(19) United States
(12) Patent Application Publication
(10) Pub. No.: US 2019/0120860 A1
(43) Pub. Date: Apr. 25, 2019

(54) METHOD FOR DETECTING BRAIN RELATED MALADIES USING OCULAR FLUID

(71) Applicant: Ascendant Dx, Springdale, AR (US)

(72) Inventors: Lindsay Rutherford, Fayetteville, AR (US); Anna Daily, Fayetteville, AR (US); Omid Moghadam, Fayetteville, AR (US)

(73) Assignee: Ascendant Dx, Springdale, AR (US)

(21) Appl. No.: 16/166,257

(22) Filed: Oct. 22, 2018

Related U.S. Application Data
(60) Provisional application No. 62/575,579, filed on Oct. 23, 2017.

(51) Int. Cl. G01N 33/68

(52) U.S. Cl. CPC G01N 33/6896; G01N 2800/60; G01N 2800/304

(57) ABSTRACT

The present disclosure is directed toward methods for detecting brain related maladies in a subject by measuring levels of at least one of the identified biomarkers, as compared to a control. Brain related maladies include physical trauma to the brain, neurodegenerative disorders, and mental illness. The detection of the target biomarkers in ocular fluid provides a simpler and more effective sample matrix as compared to other biological matrices.

### CROSS REFERENCE TO RELATED APPLICATIONS

[0001] This application claims the benefit of U.S. Provisional Patent Application No. 62/575,579, filed on Oct. 23, 2017, which is hereby incorporated by reference in its entirety.

### BACKGROUND

[0002] The present application encompasses diagnosing and/or monitoring a plurality of brain related maladies, including physical injuries, neurodegenerative disease, and mental health disorders, using biomarkers found in ocular fluid.

[0003] The human brain is a complex organ which controls every aspect of daily life. Physical injuries, degenerative diseases, and psychological disorders to and arising from the brain can have adverse effects on an individual's life. These brain related maladies can be generally broken down into three categories: physical trauma, neurodegenerative disease, and mental illness. Maladies from any one of these categories have been proven difficult to diagnose and treat therefore a reliable and fast diagnostic tool is needed in the trauma, psychological, and neurodegenerative treatment fields.

### Physical Trauma:

[0004] Physical trauma to the brain can cause a myriad of injuries ranging from minor bruising, or concussion, to internal bleeding, such as a hematoma. As such, the potential outcomes for the patient vary widely and can be greatly influenced by the speed and accuracy of proper diagnosis and treatment. The diagnosis of physical trauma induced brain injuries utilizes a series of cognitive and physiological assessments of symptoms and often times requires radiological imaging, such as a Computed Tomography (CT) scan or Magnetic resonance imaging (MM), which is not always readily available to ensure proper diagnosis is received. The broad range of injures from physical trauma to the brain can complicate proper diagnosing of a patient which inhibits fast and accurate treatment of these injuries, potentially resulting in negative outcomes for the patient.

### Mental Illness:

[0005] Mental illnesses affect the thinking, mood and/or behavior of a subject. Diagnosing mental illness is challenging with many having similar symptomology. Currently mental health practitioners primarily rely on consultations with patients to gain insight including review of family history, differential diagnosis, and review of current symptoms to propose a “most likely” diagnosis from an ever increasing plethora of mental health disorders. Proper diagnosis is the first step to effective treatment of any mental disorder and thus is a crucial steep. Mental illness symptoms can range from mild, requiring minimal treatment, to severe, requiring unwilling clinical intervention and treatment. Given the similarities between many forms of mental illness, a diagnostic test capable of differentiating different forms of mental illness is an invaluable tool for medical professionals in both the clinical and private practice settings.

### Neurodegenerative Disease:

[0006] Neurodegenerative diseases are progressive and incapacitating disorders affecting the neurons in the human brain leading to debilitating neurological deficits of a subjects' behavioral, cognitive and motor skills. (William W. Seeley, 2009) While many, if not all, of these diseases and disorders are incurable, treatment options are increased if the disease is caught early in its progression. (Friedlander, 2003) Currently many of the neurodegenerative diseases are diagnosed by differential diagnosis and occur later in the progression of the disease. In most, if not all cases, a disease diagnosis is not confirmed until post mortem. A diagnostic assay capable of diagnosing these maladies prior to the patient's death will provide additional treatment options for medical practitioners, ultimately improving the quality of life for the patients and potentially one day provide for a cure.

[0007] Diagnosis of brain maladies remains complicated and a simpler solution is greatly needed. Herein we outline a methodology to diagnose, monitor, or evaluate the treatment of brain maladies using biomarkers in ocular fluid. Ocular fluid provides a snapshot of the subject's health without the complex environment and numerous potential interferences observed in other biological samples including blood based samples. A quantitative assay for the detection of ocular fluid based biomarkers to diagnose, monitor treatment of, and determine efficacy of treatment of brain maladies is described herein.

### SUMMARY

[0008] Methods of diagnosing brain related maladies of a subject are provided herein. Methods for the characterization and diagnosis of physical brain trauma, mental illness, and neurodegenerative diseases are provided using biomarkers found in ocular fluid obtained from a subject suspected of, knowing to have, or being monitored for a brain related malady. Methods include obtaining a sample of ocular fluid from a subject and performing steps of detecting the level of at least one of the markers selected from the in table 1. The sample is optimally an ocular fluid sample, such as an isolated tear sample or ocular wash, but can also be another bodily fluid.

[0009] Kits for performing methods described herein along with medical devices capable of performing the diagnostic testing outlined are also provided herein.

### BRIEF DESCRIPTION OF THE DRAWINGS

[0010] FIG. 1 depicts a flow diagram outlining the method of the current invention to be used when a patient has a suspected brain related malady using biomarkers found in Table 1.

[0011] FIG. 2 depicts a flow diagram of the present invention in which the biomarkers found in Table 1 are used to screen a sample using a large number of said biomarkers at a given period.

### DETAILED DESCRIPTION AND EMBODIMENTS

[0012] Provided herein is a method to diagnose brain related maladies using biomarkers found in ocular fluid. The biomarkers of interest for brain related maladies are selected from the following list and are also shown in Table 1: 14 kDa phosphohistidine phosphatase, 14-3-3 protein epsilon, 14-3-3 protein sigma, 14-3-3 protein theta, 26S protease regulatory subunit 6A, 2′-deoxynucleoside 5′-phosphate N-hydrolase 1, 40S ribosomal protein S28, 40S ribosomal protein S5, 40S ribosomal protein SA, 4-trimethylaminobutyraldehyde dehydrogenase, 60S acidic ribosomal protein P1, 6-phosphogluconate dehydrogenase, decarboxylating, 6-phosphogluconolactonase, 78 kDa glucose-regulated protein, Actin-related protein 2/3 complex subunit 1B, Actin-related protein 2/3 complex subunit 2, Actin-related protein 3, Acylamino-acid-releasing enzyme, Acyl-CoA-binding protein, Adenine phosphoribosyltransferase, Adenylate kinase isoenzyme 1, Adenylyl cyclase-associated protein 1, Adipogenesis regulatory factor, Adseverin, Afamin, Aflatoxin B1 aldehyde reductase member 2, Alcohol dehydrogenase [NADP(+)], Alcohol dehydrogenase 1C, Alcohol dehydrogenase class 4 mu/sigma chain, Aldehyde dehydrogenase family 1 member A3, Aldehyde dehydrogenase, dimeric NADP-preferring, Aldo-keto reductase family 1 member C1, Alpha_1_Antitrypsin, Alpha-1-acid glycoprotein 1, Alpha-1-antichymotrypsin, Alpha-1-antitrypsin, Alpha-1B-glycoprotein, Alpha2 Macroglobulin, Alpha-2-antiplasmin, Alpha-2-HS-glycoprotein, Alpha-2-macroglobulin, Alpha-actinin-4, Alpha-aminoadipic semialdehyde dehydrogenase, Alpha-amylase 1, Alpha-enolase, Aminopeptidase B, Angiotensinogen, Annexin A1, Annexin A11, Annexin A2, Annexin A3, Annexin A4, Annexin A5, Anterior gradient protein 2 homolog, Antileukoproteinase, Antithrombin-III, Apolipoprotein A-I, Apolipoprotein A-II, Apolipoprotein A-IV, apoliprotein A1, Argininosuccinate synthase, Aspartate aminotransferase, cytoplasmic, Astrocytic phosphoprotein PEA-15, Basement membrane-specific heparan sulfate proteoglycan core protein, BDNF, Beta-2-glycoprotein 1, Beta-2-microglobulin, Bifunctional purine biosynthesis protein PURH, Bone morphogenetic protein receptor type-2, Brain acid soluble protein 1, C4b-binding protein alpha chain, Calcyphosin, Calmodulin, Calmodulin-like protein 3, Calmodulin-like protein 5, Calpain small subunit 1, Calpain-1 catalytic subunit, Calpain-2 catalytic subunit, Calpastatin, Calreticulin, Calumenin, Carbonic anhydrase 13, Carbonyl reductase [NADPH] 1, Caspase-14, Catalase, Catechol O-methyltransferase, Cathepsin B, Cell division control protein 42 homolog, Ceruloplasmin, Charged multivesicular body protein 4b, Chitinase-3-like protein 2, Chloride intracellular channel protein 1, Chromosome 6 open reading frame 55, isoform CRA_b, Cluster of 14-3-3 protein zeta/delta, Cluster of Beta-actin-like protein 2, Cluster of CON_P08727, Cluster of Cystatin-S, Cluster of Extracellular glycoprotein lacritin, Cluster of Ezrin, Cluster of Fructose-bisphosphate aldolase A, Cluster of Haptoglobin, Cluster of Heat shock 70 kDa protein 1A/1B, Cluster of Heat shock protein beta-1, Cluster of Heat shock protein HSP 90-alpha, Cluster of Ig alpha-1 chain C region, Cluster of Ig alpha-1 chain V-III region HAH, Cluster of Ig gamma-1 chain C region, Cluster of Ig kappa chain V-I region EU, Cluster of Ig kappa chain V-III region HAH, Cluster of Ig lambda chain V-III region LOI, Cluster of Protein disulfide-isomerase A3, Cluster of Protein IGKV1-33, Cluster of Protein IGKV3-11, Cluster of Rab GDP dissociation inhibitor beta, Cluster of Serum albumin, Cluster of Tubulin beta-4B chain, Clusterin, Coagulation factor XII, Cofilin-1, Coiled-coil domain-containing protein 96, Complement C3, Complement C4-B, Complement component C7, Complement factor H, Complement factor I, Cornifin-B, Coronin-1A, Costars family protein ABRACL, Cullin-associated NEDD8-dissociated protein 1, Cystatin-B, Cystatin-C, Cystatin-D, Cystatin-SN, Cysteine-rich protein 1, Cytosol aminopeptidase, Cytosolic non-specific dipeptidase, D-3-phosphoglycerate dehydrogenase, D-dopachrome decarboxylase, Deleted in malignant brain tumors 1 protein, Dermcidin, Destrin, Dihydropteridine reductase, Dipeptidyl peptidase 3, DNA dC->dU-editing enzyme APOBEC-3A, Drebrin-like protein, Echinoderm microtubule-associated protein-like 2, EF-hand domain-containing protein D2, EGF, Elongation factor 1-alpha 1, Elongation factor 1-beta, Elongation factor 1-gamma, Elongation factor 2, Endoplasmic reticulum resident protein 29, Epidermal growth factor receptor kinase substrate 8-like protein 1, ERO1-like protein alpha, Ester hydrolase C11orf54, Eukaryotic initiation factor 4A-II, Eukaryotic translation initiation factor 4H, Eukaryotic translation initiation factor 6, F-actin-capping protein subunit alpha-1, F-actin-capping protein subunit alpha-2, Farnesyl diphosphate synthase, Fatty acid-binding protein, epidermal, F-box only protein 50, Fibrinogen alpha chain, Fibrinogen beta chain, Fibrinogen gamma chain, Filamin-B, Flavin reductase (NADPH), Fructose-1,6-bisphosphatase 1, defensin-1, Galectin-3, Galectin-3-binding protein, Gamma-glutamylcyclotransferase, GDP-L-fucose synthase, Gelsolin, Glucose-6-phosphate 1-dehydrogenase, Glucose-6-phosphate isomerase, Glutamine synthetase, Glutaredoxin-1, Glutathione reductase, mitochondrial, Glutathione S-transferase, Glutathione S-transferase P, Glutathione synthetase, Glyceraldehyde-3-phosphate dehydrogenase, Glycogen phosphorylase, liver form, Glyoxalase domain-containing protein 4, GMP reductase, Golgi membrane protein 1, GTP cyclohydrolase 1 feedback regulatory protein, GTP-binding nuclear protein Ran, Haptoglobulin, Heat shock 70 kDa protein 4, Heat shock cognate 71 kDa protein, Heme-binding protein 2, Hemoglobin subunit alpha, Hemoglobin subunit beta, Hemopexin, Heterogeneous nuclear ribonucleoprotein DO, Heterogeneous nuclear ribonucleoprotein K, Heterogeneous nuclear ribonucleoprotein M, Heterogeneous nuclear ribonucleoproteins A2/B1, High mobility group protein B1, Histidine triad nucleotide-binding protein 1, Histidine-rich glycoprotein, Histone H1.5, Histone H2A type 1-D, HLA class I histocompatibility antigen, B-54 alpha chain, Hsp90 co-chaperone Cdc37, Ig delta chain C region, Ig epsilon chain C region, Ig gamma-2 chain C region, Ig gamma-4 chain C region, Ig heavy chain V-III region TIL, Ig kappa chain V-I region BAN, Ig kappa chain V-IV region, Ig lambda chain V-I region HA, Ig lambda chain V-IV region Hil, Ig lambda-3 chain C regions, Ig mu chain C region, IL-6, Immunoglobulin J chain, Immunoglobulin lambda-like polypeptide 5, Importin subunit beta-1, Inorganic pyrophosphatase, Inositol polyphosphate 1-phosphatase, Insulin-like growth factor-binding protein complex acid labile subunit, Inter-alpha-trypsin inhibitor heavy chain H1, Inter-alpha-trypsin inhibitor heavy chain H2, Interleukin-1 receptor antagonist protein, Involucrin, Isocitrate dehydrogenase [NADP] cytoplasmic, ITIH4 protein, Keratin, Keratin type I cytoskeletal 9, Keratin type II cytoskeletal 1, Ketimine reductase mu-crystallin, Kininogen-1, Kynureninase, Lactoperoxidase, Lactotransferrin, Lactrin, Latexin, Leucine-rich alpha-2-glycoprotein, Leukocyte elastase inhibitor, Leukotriene A-4 hydrolase, LIM and SH3 domain protein 1, Lipocalin-1, Lipolysis-stimulated lipoprotein receptor, L-lactate dehydrogenase A chain, L-lactate dehydrogenase B chain, Low molecular weight phosphotyrosine protein phosphatase, Lymphocyte-specific protein 1, Lysine-tRNA ligase, Lysozyme C, Macrophage migration inhibitory factor, Macrophage-capping protein, Malate dehydrogenase, cytoplasmic, Malate dehydrogenase, mitochondrial, Mammaglobin-B, Matrix metalloproteinase-9, Mesothelin, Metalloproteinase inhibitor 1, MIP1beta, Mucin-SAC, Mucin-like protein 1, Myeloperoxidase, Myosin light polypeptide 6, Myosin regulatory light chain 12A, Myosin-14, Myosin-15, Myosin-9, Myotrophin, Na(+)/H(+) exchange regulatory cofactor NHE-RF1, N-acetylmuramoyl-L-alanine amidase, Nascent polypeptide-associated complex subunit alpha, muscle-specific form, Neutrophil defensin 1, Neutrophil gelatinase-associated lipocalin, Niban-like protein 1, Nicotinate phosphoribosyltransferase, Non-histone chromosomal protein HMG-14, Nucleobindin 2, isoform CRA_b, Nucleobindin-1, Nucleoside diphosphate kinase B, Omega-amidase NIT2, PAI-1, PDZ and LIM domain protein 1, PDZ and LIM domain protein 5, Peptidyl-prolyl cis-trans isomerase A, Peptidyl-prolyl cis-trans isomerase B, Peptidyl-prolyl cis-trans isomerase FKBP1A, Perilipin-3, Periplakin, Peroxiredoxin-1, Peroxiredoxin-2, Peroxiredoxin-5, mitochondrial, Peroxiredoxin-6, Phosphatidylethanolamine-binding protein 1, Phosphoglucomutase-1, Phosphoglycerate kinase 1, Phosphoglycerate mutase 1, Phospholipase A2, membrane associated, Phospholipid transfer protein, Plasma protease C1 inhibitor, Plasminogen, Plasminogen activator inhibitor 1 RNA-binding protein, Plastin-2, Plastin-3, Platelet-activating factor acetylhydrolase IB subunit beta, Plectin, Poly(rC)-binding protein 1, Polymeric immunoglobulin receptor, Profilin-1, Programmed cell death 6-interacting protein, Prolactin, Prolactin-inducible protein, Proline-rich protein 27, Proline-rich protein 4, Prolyl endopeptidase, Prosaposin, Prostasin, Proteasome activator complex subunit 1, Proteasome activator complex subunit 2, Proteasome subunit alpha type-4, Proteasome subunit alpha type-7, Proteasome subunit beta type-2, Protein AMBP, Protein deglycase DJ-1, Protein disulfide-isomerase, Protein IGHV3-49, Protein IGHV4-4, Protein IGKV2-28, Protein IGKV2-30, Protein IGKV2D-24, Protein IGLV3-19, Protein NDRG2, Protein S100-A11, Protein S100-A4, Protein S100-A6, Protein S100-A8, Protein S100-A9, Protein S100-P, Protein SETSIP, Protein-glutamine gamma-glutamyltransferase 2, Prothrombin, Prothymosin alpha, Puromycin-sensitive aminopeptidase, Putative uncharacterized protein FLJ37218, Pyruvate kinase PKM, RANTES, Ras GTPase-activating-like protein IQGAP1, Ras-related protein Rab-10, Ras-related protein Rab-1A, Ras-related protein Rab-7a, Renin, Reticulocalbin-1, Retinal dehydrogenase 1, Retinoic acid receptor responder protein 1, Retinol binding protein 4, plasma, isoform CRA_b, Rho GDP-dissociation inhibitor 1, Rho GDP-dissociation inhibitor 2, Ribonuclease 4, Ribonuclease inhibitor, Ribonuclease T2, Rootletin, S Protease regulatory subunit 6A, Secreted frizzled-related protein 1, Secretoglobin family 1D member 1, Selenium-binding protein 1, Serine hydroxymethyltransferase, cytosolic, Serine/threonine-protein phosphatase CPPED1, Serotransferrin, Serpin B5, SH3 domain-binding glutamic acid-rich-like protein, SH3 domain-binding glutamic acid-rich-like protein 3, Sialic acid synthase, Signal transducer and activator of transcription, Small proline-rich protein 2A, Small proline-rich protein 3, Small ubiquitin-related modifier 3, S-methyl-5′-thioadenosine phosphorylase, Sorbitol dehydrogenase, SPARC-like protein 1, Specifically androgen-regulated gene protein, Src substrate cortactin, Stem Cell Factor, Stress-induced-phosphoprotein 1, Submaxillary gland androgen-regulated protein 3B, Sulfhydryl oxidase 1, Sulfurtransferase, Superoxide dismutase [Cu—Zn], Superoxide dismutase [Mn], mitochondrial, Talin-1, Tax1-binding protein 3, T-complex protein 1 subunit beta, Thioredoxin, Thioredoxin domain-containing protein 17, Thioredoxin reductase 1, cytoplasmic, Thioredoxin-like protein 1 (Fragment), Thiosulfate sulfurtransferase/rhodanese-like domain-containing protein 1, Thymidine phosphorylase, Thymosin beta-10, Thymosin beta-4, TIMP1, TNF alpha receptor II, TNF-RII, Transaldolase, Transcobalamin-1, Transforming protein RhoA, Transgelin-2, Transitional endoplasmic reticulum ATPase, Transketolase, Transthyretin, Trefoil factor 3, Triosephosphate isomerase, Tropomyosin alpha-3 chain, Tropomyosin alpha-4 chain, Tryptophan-tRNA ligase, cytoplasmic, Tubulin-specific chaperone A, Ubiquitin-40S ribosomal protein S27a, Ubiquitin-like modifier-activating enzyme 1, UMP-CMP kinase, UTP-glucose-1-phosphate uridylyltransferase, UV excision repair protein RAD23 homolog B, VEGF, VEGF coregulated chemokine 1, Vimentin, Vitamin D-binding protein, Vitronectin, V-type proton ATPase subunit B, brain isoform, V-type proton ATPase subunit G 1, WD repeat-containing protein 1, Xaa-Pro aminopeptidase 1, Xaa-Pro dipeptidase, Zinc-alpha-2-glycoprotein, and Zymogen granule protein 16 homolog B.

[0013] The term “brain related malady”, as used throughout the present disclosure, is defined as any disorder of the brain caused by disease, injury, or natural aging which causes cognitive or physiological impairment of the subject. Brain related maladies can generally be classified into three categories each with differing causalities: Physical trauma, neurodegenerative disease, and mental health. Each category of brain disorder brings its own host of diagnostic issues making it difficult for physicians and medical professionals to diagnose. The present disclosure generally seeks to expedite diagnosis of the outlined brain related maladies through use of biomarkers found in ocular fluid obtained from a subject.

[0014] Research using biomarkers has grown significantly over recent years. Biomarkers have been shown to provide previously unthinkable insight into the overall health of a subject. As discussed by Daily et. al. biomarkers have been shown to diagnose various types of cancer including breast cancer. (U.S. patent application Ser. Nos. 14/879,982 and 14/707,089) Biomarkers are defined as a biological compound or molecule, including protein and protein fragments, found in a biological sample which is indicative of a normal or abnormal biological process. (NCI webpage). Biomarkers are found in most any biological medium including, blood, tissue, saliva, seamen, vaginal secretion, mucus, hair, spinal fluid, and plasma. The present invention utilizes ocular fluid as a diagnostic medium for biomarker quantification and detection. Ocular fluid, as referenced throughout this disclosure, is defined as any fluid or liquid obtained from any surface of the eye or ocular cavity containing components (protein, DNA, RNA, bacteria, viruses, etc.) which have arisen within the ocular cavity, including the lacrimal gland, meibomian gland, or other tissues that connect with the lymphatic system, or at another location within the body. The terms “ocular fluid”, “tear(s)”, “ocular secretion”, and “ocular wash” are used interchangeably herein. Examples of ocular fluid comprise lacrimal secretions, vitreous humor, aqueous humor, meibum, and tears.

TABLE 1

| # | Biomarkers |
|---|---|
| 1 | 14 kDa phosphohistidine phosphatase |
| 2 | 14-3-3 protein epsilon |
| 3 | 14-3-3 protein sigma |
| 4 | 14-3-3 protein theta |
| 5 | 26S protease regulatory subunit 6A |
| 6 | 2′-deoxynucleoside 5′-phosphate N- |
| | hydrolase 1 |
| 7 | 40S ribosomal protein S28 |
| 8 | 40S ribosomal protein S5 |
| 9 | 40S ribosomal protein SA |
| 10 | 4-trimethylaminobutyraldehyde |
| | dehydrogenase |
| 11 | 60S acidic ribosomal protein P1 |
| 12 | 6-phosphogluconate dehydrogenase, |
| | decarboxylating |
| 13 | 6-phosphogluconolactonase |
| 14 | 78 kDa glucose-regulated protein |
| 15 | Actin-related protein 2/3 complex subunit 1B |
| 16 | Actin-related protein 2/3 complex subunit 2 |
| 17 | Actin-related protein 3 |
| 18 | Acylamino-acid-releasing enzyme |
| 19 | Acyl-CoA-binding protein |
| 20 | Adenine phosphoribosyltransferase |
| 21 | Adenylate kinase isoenzyme 1 |
| 22 | Adenylyl cyclase-associated protein 1 |
| 23 | Adipogenesis regulatory factor |
| 24 | Adseverin |
| 25 | Afamin |
| 26 | Aflatoxin B1 aldehyde reductase member 2 |
| 27 | Alcohol dehydrogenase [NADP(+)] |
| 28 | Alcohol dehydrogenase 1C |
| 29 | Alcohol dehydrogenase class 4 mu/sigma |
| | chain |
| 30 | Aldehyde dehydrogenase family 1 member |
| | A3 |
| 31 | Aldehyde dehydrogenase, dimeric NADP- |
| | preferring |
| 32 | Aldo-keto reductase family 1 member C1 |
| 33 | Alpha_1_Antitrypsin |
| 34 | Alpha-1-acid glycoprotein 1 |
| 35 | Alpha-1-antichymotrypsin |
| 36 | Alpha-1-antitrypsin |
| 37 | Alpha-1B-glycoprotein |
| 38 | Alpha2 Macroglobulin |
| 39 | Alpha-2-antiplasmin |
| 40 | Alpha-2-HS-glycoprotein |
| 41 | Alpha-2-macroglobulin |
| 42 | Alpha-actinin-4 |
| 43 | Alpha-aminoadipic semialdehyde |
| | dehydrogenase |
| 44 | Alpha-amylase 1 |
| 45 | Alpha-enolase |
| 46 | Aminopeptidase B |
| 47 | Angiotensinogen |
| 48 | Annexin A1 |
| 49 | Annexin A11 |
| 50 | Annexin A2 |
| 51 | Annexin A3 |
| 52 | Annexin A4 |
| 53 | Annexin A5 |
| 54 | Anterior gradient protein 2 homolog |
| 55 | Antileukoproteinase |
| 56 | Antithrombin-III |
| 57 | Apolipoprotein A-I |
| 58 | Apolipoprotein A-II |
| 59 | Apolipoprotein A-IV |
| 60 | apoliprotein A1 |
| 61 | Argininosuccinate synthase |
| 62 | Aspartate aminotransferase, cytoplasmic |
| 63 | Astrocytic phosphoprotein PEA-15 |
| 64 | Basement membrane-specific heparan |
| | sulfate proteoglycan core protein |
| 65 | BDNF |
| 66 | Beta-2-glycoprotein 1 |
| 67 | Beta-2-microglobulin |
| 68 | Bifunctional purine biosynthesis protein |
| | PURH |
| 69 | Bone morphogenetic protein receptor type-2 |
| 70 | Brain acid soluble protein 1 |
| 71 | C4b-binding protein alpha chain |
| 72 | Calcyphosin |
| 73 | Calmodulin |
| 74 | Calmodulin-like protein 3 |
| 75 | Calmodulin-like protein 5 |
| 76 | Calpain small subunit 1 |
| 77 | Calpain-1 catalytic subunit |
| 78 | Calpain-2 catalytic subunit |
| 79 | Calpastatin |
| 80 | Calreticulin |
| 81 | Calumenin |
| 82 | Carbonic anhydrase 13 |
| 83 | Carbonyl reductase [NADPH] 1 |
| 84 | Caspase-14 |
| 85 | Catalase |
| 86 | Catechol O-methyltransferase |
| 87 | Cathepsin B |
| 88 | Cell division control protein 42 homolog |
| 89 | Ceruloplasmin |
| 90 | Charged multivesicular body protein 4b |
| 91 | Chitinase-3-like protein 2 |
| 92 | Chloride intracellular channel protein 1 |
| 93 | Chromosome 6 open reading frame 55, |
| | isoform CRA_b |
| 94 | Cluster of 14-3-3 protein zeta/delta |
| 95 | Cluster of Beta-actin-like protein 2 |
| 96 | Cluster of CON_{——}P08727 |
| 97 | Cluster of Cystatin-S |
| 98 | Cluster of Extracellular glycoprotein lacritin |
| 99 | Cluster of Ezrin |
| 100 | Cluster of Fructose-bisphosphate aldolase A |
| 101 | Cluster of Haptoglobin |
| 102 | Cluster of Heat shock 70 kDa protein 1A/1B |
| 103 | Cluster of Heat shock protein beta-1 |
| 104 | Cluster of Heat shock protein HSP 90-alpha |
| 105 | Cluster of Ig alpha-1 chain C region |
| 106 | Cluster of Ig alpha-1 chain V-III region HAH |
| 107 | Cluster of Ig gamma-1 chain C region |
| 108 | Cluster of Ig kappa chain V-I region EU |
| 109 | Cluster of Ig kappa chain V-III region HAH |
| 110 | Cluster of Ig lambda chain V-III region LOI |
| 111 | Cluster of Protein disulfide-isomerase A3 |
| 112 | Cluster of Protein IGKV1-33 |
| 113 | Cluster of Protein IGKV3-11 |
| 114 | Cluster of Rab GDP dissociation inhibitor beta |
| 115 | Cluster of Serum albumin |
| 116 | Cluster of Tubulin beta-4B chain |
| 117 | Clusterin |
| 118 | Coagulation factor XII |
| 119 | Cofilin-1 |
| 120 | Coiled-coil domain-containing protein 96 |
| 121 | Complement C3 |
| 122 | Complement C4-B |
| 123 | Complement component C7 |
| 124 | Complement factor H |
| 125 | Complement factor I |
| 126 | Cornifin-B |
| 127 | Coronin-1A |
| 128 | Costars family protein ABRACL |
| 129 | Cullin-associated NEDD8-dissociated protein 1 |
| 130 | Cystatin-B |
| 131 | Cystatin-C |
| 132 | Cystatin-D |
| 133 | Cystatin-SN |
| 134 | Cysteine-rich protein 1 |
| 135 | Cytosol aminopeptidase |
| 136 | Cytosolic non-specific dipeptidase |
| 137 | D-3-phosphoglycerate dehydrogenase |
| 138 | D-dopachrome decarboxylase |
| 139 | Defensin-1 |
| 140 | Deleted in malignant brain tumors 1 protein |
| 141 | Dermcidin |
| 142 | Destrin |
| 143 | Dihydropteridine reductase |
| 144 | Dipeptidyl peptidase 3 |
| 145 | DNA dC−>dU-editing enzyme APOBEC-3A |
| 146 | Drebrin-like protein |
| 147 | Echinoderm microtubule-associated protein-like 2 |
| 148 | EF-hand domain-containing protein D2 |
| 149 | EGF |
| 150 | Elongation factor 1-alpha 1 |
| 151 | Elongation factor 1-beta |
| 152 | Elongation factor 1-gamma |
| 153 | Elongation factor 2 |
| 154 | Endoplasmic reticulum resident protein 29 |
| 155 | Epidermal growth factor receptor kinase |
| | substrate 8-like protein 1 |
| 156 | ERO1-like protein alpha |
| 157 | Ester hydrolase C11orf54 |
| 158 | Eukaryotic initiation factor 4A-II |
| 159 | Eukaryotic translation initiation factor 4H |
| 160 | Eukaryotic translation initiation factor 6 |
| 161 | F-actin-capping protein subunit alpha-1 |
| 162 | F-actin-capping protein subunit alpha-2 |
| 163 | Farnesyl diphosphate synthase |
| 164 | Fatty acid-binding protein, epidermal |
| 165 | F-box only protein 50 |
| 166 | Fibrinogen alpha chain |
| 167 | Fibrinogen beta chain |
| 168 | Fibrinogen gamma chain |
| 169 | Filamin-B |
| 170 | Flavin reductase (NADPH) |
| 171 | Fructose-1,6-bisphosphatase 1 |
| 172 | Galectin-3 |
| 173 | Galectin-3-binding protein |
| 174 | Gamma-glutamylcyclotransferase |
| 175 | GDP-L-fucose synthase |
| 176 | Gelsolin |
| 177 | Glucose-6-phosphate 1-dehydrogenase |
| 178 | Glucose-6-phosphate isomerase |
| 179 | Glutamine synthetase |
| 180 | Glutaredoxin-1 |
| 181 | Glutathione reductase, mitochondrial |
| 182 | Glutathione S-transferase |
| 183 | Glutathione S-transferase P |
| 184 | Glutathione synthetase |
| 185 | Glyceraldehyde-3-phosphate dehydrogenase |
| 186 | Glycogen phosphorylase, liver form |
| 187 | Glyoxalase domain-containing protein 4 |
| 188 | GMP reductase |
| 189 | Golgi membrane protein 1 |
| 190 | GTP cyclohydrolase 1 feedback regulatory |
| | protein |
| 191 | GTP-binding nuclear protein Ran |
| 192 | Haptoglobulin |
| 193 | Heat shock 70 kDa protein 4 |
| 194 | Heat shock cognate 71 kDa protein |
| 195 | Heme-binding protein 2 |
| 196 | Hemoglobin subunit alpha |
| 197 | Hemoglobin subunit beta |
| 198 | Hemopexin |
| 199 | Heterogeneous nuclear ribonucleoprotein D0 |
| 200 | Heterogeneous nuclear ribonucleoprotein K |
| 201 | Heterogeneous nuclear ribonucleoprotein M |
| 202 | Heterogeneous nuclear ribonucleoproteins |
| | A2/B1 |
| 203 | High mobility group protein B1 |
| 204 | Histidine triad nucleotide-binding protein 1 |
| 205 | Histidine-rich glycoprotein |
| 206 | Histone H1.5 |
| 207 | Histone H2A type 1-D |
| 208 | HLA class I histocompatibility antigen, B-54 |
| | alpha chain |
| 209 | Hsp90 co-chaperone Cdc37 |
| 210 | Ig delta chain C region |
| 211 | Ig epsilon chain C region |
| 212 | Ig gamma-2 chain C region |
| 213 | Ig gamma-4 chain C region |
| 214 | Ig heavy chain V-III region TIL |
| 215 | Ig kappa chain V-I region BAN |
| 216 | Ig kappa chain V-IV region |
| 217 | Ig lambda chain V-I region HA |
| 218 | Ig lambda chain V-IV region Hil |
| 219 | Ig lambda-3 chain C regions |
| 220 | Ig mu chain C region |
| 221 | IL-6 |
| 222 | Immunoglobulin J chain |
| 223 | Immunoglobulin lambda-like polypeptide 5 |
| 224 | Importin subunit beta-1 |
| 225 | Inorganic pyrophosphatase |
| 226 | Inositol polyphosphate 1-phosphatase |
| 227 | Insulin-like growth factor-binding protein |
| | complex acid labile subunit |
| 228 | Inter-alpha-trypsin inhibitor heavy chain H1 |
| 229 | Inter-alpha-trypsin inhibitor heavy chain H2 |
| 230 | lnterleukin-1 receptor antagonist protein |
| 231 | Involucrin |
| 232 | Isocitrate dehydrogenase [NADP] |
| | cytoplasmic |
| 233 | ITIH4 protein |
| 234 | Keratin |
| 235 | Keratin type I cytoskeletal 9 |
| 236 | Keratin type II cytoskeletal 1 |
| 237 | Ketimine reductase mu-crystallin |
| 238 | Kininogen-1 |
| 239 | Kynureninase |
| 240 | Lactoperoxidase |
| 241 | Lactotransferrin |
| 242 | Lactrin |
| 243 | Latexin |
| 244 | Leucine-rich alpha-2-glycoprotein |
| 245 | Leukocyte elastase inhibitor |
| 246 | Leukotriene A-4 hydrolase |
| 247 | LIM and SH3 domain protein 1 |
| 248 | Lipocalin-1 |
| 249 | Lipolysis-stimulated lipoprotein receptor |
| 250 | L-lactate dehydrogenase A chain |
| 251 | L-lactate dehydrogenase B chain |
| 252 | Low molecular weight phosphotyrosine |
| | protein phosphatase |
| 253 | Lymphocyte-specific protein 1 |
| 254 | Lysine--tRNA ligase |
| 255 | Lysozyme C |
| 256 | Macrophage migration inhibitory factor |
| 257 | Macrophage-capping protein |
| 258 | Malate dehydrogenase, cytoplasmic |
| 259 | Malate dehydrogenase, mitochondrial |
| 260 | Mammaglobin-B |
| 261 | Matrix metalloproteinase-9 |
| 262 | Mesothelin |
| 263 | Metalloproteinase inhibitor 1 |
| 264 | MIP1beta |
| 265 | Mucin-5AC |
| 266 | Mucin-like protein 1 |
| 267 | Myeloperoxidase |
| 268 | Myosin light polypeptide 6 |
| 269 | Myosin regulatory light chain 12A |
| 270 | Myosin-14 |
| 271 | Myosin-15 |
| 272 | Myosin-9 |
| 273 | Myotrophin |
| 274 | Na(+)/H(+) exchange regulatory cofactor NHE- |
| | RF1 |
| 275 | N-acetylmuramoyl-L-alanine amidase |
| 276 | Nascent polypeptide-associated complex |
| | subunit alpha, muscle-specific form |
| 277 | Neutrophil defensin 1 |
| 278 | Neutrophil gelatinase-associated lipocalin |
| 279 | Niban-like protein 1 |
| 280 | Nicotinate phosphoribosyltransferase |
| 281 | Non-histone chromosomal protein HMG-14 |
| 282 | Nucleobindin 2, isoform CRA_b |
| 283 | Nucleobindin-1 |
| 284 | Nucleoside diphosphate kinase B |
| 285 | Omega-amidase NIT2 |
| 286 | PAI-1 |
| 287 | PDZ and LIM domain protein 1 |
| 288 | PDZ and LIM domain protein 5 |
| 289 | Peptidyl-prolyl cis-trans isomerase A |
| 290 | Peptidyl-prolyl cis-trans isomerase B |
| 291 | Peptidyl-prolyl cis-trans isomerase FKBP1A |
| 292 | Perilipin-3 |
| 293 | Periplakin |
| 294 | Peroxiredoxin-1 |
| 295 | Peroxiredoxin-2 |
| 296 | Peroxiredoxin-5, mitochondrial |
| 297 | Peroxiredoxin-6 |
| 298 | Phosphatidylethanolamine-binding protein 1 |
| 299 | Phosphoglucomutase-1 |
| 300 | Phosphoglycerate kinase 1 |
| 301 | Phosphoglycerate mutase 1 |
| 302 | Phospholipase A2, membrane associated |
| 303 | Phospholipid transfer protein |
| 304 | Plasma protease C1 inhibitor |
| 305 | Plasminogen |
| 307 | Plasminogen activator inhibitor 1 RNA- |
| | binding protein |
| 308 | Plastin-2 |
| 309 | Plastin-3 |
| 310 | Platelet-activating factor acetylhydrolase IB |
| | subunit beta |
| 311 | Plectin |
| 312 | Poly(rC)-binding protein 1 |
| 313 | Polymeric immunoglobulin receptor |
| 314 | Profilin-1 |
| 315 | Programmed cell death 6-interacting protein |
| 316 | Prolactin |
| 317 | Prolactin-inducible protein |
| 318 | Proline-rich protein 27 |
| 319 | Proline-rich protein 4 |
| 320 | Prolyl endopeptidase |
| 321 | Prosaposin |
| 322 | Prostasin |
| 323 | Proteasome activator complex subunit 1 |
| 324 | Proteasome activator complex subunit 2 |
| 325 | Proteasome subunit alpha type -4 |
| 326 | Proteasome subunit alpha type-7 |
| 327 | Proteasome subunit beta type-2 |
| 328 | Protein AMBP |
| 329 | Protein deglycase DJ-1 |
| 330 | Protein disulfide-isomerase |
| 331 | Protein IGHV3-49 |
| 332 | Protein IGHV4-4 |
| 333 | Protein IGKV2-28 |
| 334 | Protein IGKV2-30 |
| 335 | Protein IGKV2D-24 |
| 336 | Protein IGLV3-19 |
| 337 | Protein NDRG2 |
| 338 | Protein S100-A11 |
| 339 | Protein S100-A4 |
| 340 | Protein S100-A6 |
| 341 | Protein S100-A8 |
| 342 | Protein S100-A9 |
| 343 | Protein S100-P |
| 344 | Protein SETSIP |
| 345 | Protein-glutamine gamma- |
| | glutamyltransferase 2 |
| 346 | Prothrombin |
| 347 | Prothymosin alpha |
| 348 | Puromycin-sensitive aminopeptidase |
| 349 | Putative uncharacterized protein FLJ37218 |
| 350 | Pyruvate kinase PKM |
| 351 | RANTES |
| 352 | Ras GTPase-activating-like protein IQGAP1 |
| 353 | Ras-related protein Rab-10 |
| 354 | Ras-related protein Rab-1A |
| 355 | Ras-related protein Rab-7a |
| 356 | Renin |
| 357 | Reticulocalbin-1 |
| 358 | Retinal dehydrogenase 1 |
| 359 | Retinoic acid receptor responder protein 1 |
| 360 | Retinol binding protein 4, plasma, isoform |
| | CRA_b |
| 361 | Rho GDP-dissociation inhibitor 1 |
| 362 | Rho GDP-dissociation inhibitor 2 |
| 363 | Ribonuclease 4 |
| 364 | Ribonuclease inhibitor |
| 365 | Ribonuclease T2 |
| 366 | Rootletin |
| 367 | S Protease regulatory subunit 6A |
| 368 | Secreted frizzled-related protein 1 |
| 369 | Secretoglobin family 1D member 1 |
| 370 | Selenium-binding protein 1 |
| 371 | Serine hydroxymethyltransferase, cytosolic |
| 372 | Serine/threonine-protein phosphatase |
| | CPPED1 |
| 373 | Serotransferrin |
| 374 | Serpin B5 |
| 375 | SH3 domain-binding glutamic acid-rich-like |
| | protein |
| 376 | SH3 domain-binding glutamic acid-rich-like |
| | protein 3 |
| 377 | Sialic acid synthase |
| 378 | Signal transducer and activator of |
| | transcription |
| 379 | Small proline-rich protein 2A |
| 380 | Small proline-rich protein 3 |
| 381 | Small ubiquitin-related modifier 3 |
| 382 | S-methyl-5′-thioadenosine phosphorylase |
| 383 | Sorbitol dehydrogenase |
| 384 | SPARC-like protein 1 |
| 385 | Specifically androgen-regulated gene protein |
| 386 | Src substrate cortactin |
| 387 | Stem Cell Factor |
| 388 | Stress-induced-phosphoprotein 1 |
| 389 | Submaxillary gland androgen-regulated |
| | protein 3B |
| 390 | Sulfhydryl oxidase 1 |
| 391 | Sulfurtransferase |
| 392 | Superoxide dismutase [Cu—Zn] |
| 393 | Superoxide dismutase [Mn], mitochondrial |
| 394 | Talin-1 |
| 395 | Tax1-binding protein 3 |
| 396 | T-complex protein 1 subunit beta |
| 397 | Thioredoxin |
| 398 | Thioredoxin domain-containing protein 17 |
| 399 | Thioredoxin reductase 1, cytoplasmic |
| 400 | Thioredoxin-like protein 1 (Fragment) |
| 401 | Thiosulfate sulfurtransferase/rhodanese-like |
| | domain-containing protein 1 |
| 402 | Thymidine phosphorylase |
| 403 | Thymosin beta-10 |
| 404 | Thymosin beta-4 |
| 405 | TIMP1 |
| 406 | TNF alpha receptor II |
| 407 | TNF-RII |
| 408 | Transaldolase |
| 409 | Transcobalamin-1 |
| 410 | Transforming protein RhoA |
| 411 | Transgelin-2 |
| 412 | Transitional endoplasmic reticulum ATPase |
| 413 | Transketolase |
| 414 | Transthyretin |
| 415 | Trefoil factor 3 |
| 416 | Triosephosphate isomerase |
| 417 | Tropomyosin alpha-3 chain |
| 418 | Tropomyosin alpha-4 chain |
| 419 | Tryptophan--tRNA ligase, cytoplasmic |
| 420 | Tubulin-specific chaperone A |
| 421 | Ubiquitin-40S ribosomal protein S27a |
| 422 | Ubiquitin-like modifier-activating enzyme 1 |
| 423 | UMP-CMP kinase |
| 424 | UTP--glucose-1-phosphate |
| | uridylyltransferase |
| 425 | UV excision repair protein RAD23 homolog B |
| 426 | VEGF |
| 427 | VEGF coregulated chemokine 1 |
| 428 | Vimentin |
| 429 | Vitamin D-binding protein |
| 430 | Vitronectin |
| 431 | V-type proton ATPase subunit B, brain |
| | isoform |
| 432 | V-type proton ATPase subunit G 1 |
| 433 | WD repeat-containing protein 1 |
| 434 | Xaa-Pro aminopeptidase 1 |
| 435 | Xaa-Pro dipeptidase |
| 436 | Zinc-alpha-2-glycoprotein |
| 437 | Zymogen granule protein 16 homolog B |

[0015] Subjects include humans, livestock, domesticated animals such as cats, dogs, cows, pigs, or other animals susceptible to brain trauma, mental illness, or neurodegenerative disease or is being tested for having or is suspected to have suffered a physical brain injury, brain trauma, mental illness, or neurodegenerative disease or other communicable, mental, or transmittable disease. Thus the terms “subject” and “patient” is used interchangeably herein. The subjects can be suspected of having a medical condition, being treated for a medical condition, or being monitored post treatment for a medical condition including brain related maladies. The methods and kits described herein can be used to diagnose, monitor, and prevent the spread of disease and other medical conditions. Medical condition as used throughout is defined as any physical or mental condition requiring diagnosis or treatment by a medical professional.

[0016] Biomarkers are found in multiple sources throughout the living organism. Often researchers and medical professionals rely on biomarkers found in blood samples as there is a comfort with the blood sample matrix, as it has been used extensively for many years. However the use of blood, including plasma, platelets, and serum as a sample medium for biomarker diagnostics poses significant issues when looking to quantify or detect certain biomarkers. Small molecular weight biomarkers tend to be obscured by other constituents in the blood sample matrix masking their presence, thus rendering them useless for diagnostic applications. As shown in Table 2 below, biomarkers can be identified in both blood and ocular fluid mediums. Ocular fluid often provides a more suitable medium for biomarker analysis as there are fewer interferences and processing steps involved. Also, the risk to technicians handling the samples are minimized with ocular fluid based samples as ocular fluid is void of many pathogens found in blood samples.

[0017] Physical trauma to the brain can cause a wide range of symptoms including impaired vision, headache, nausea, and dizziness/vertigo. The results of physical trauma can range from mild, such as a concussion, to severe, as in Traumatic Brain Injury (TBI). In many cases the signs and symptoms of physical brain trauma do not manifest until sometime after the initial injury leading to increased risk of secondary injuries (ex, athlete returning to play and sustaining another injury to the brain). The proper diagnosis is critical for the patient to avoid long term negative outcomes. Traditionally medical professionals rely on imaging to aid in the diagnosis of suspected brain trauma along with neurological and cognitive testing. Current imaging methods include CT scans and MM imaging. However these imaging techniques are not without issue. Radiographic imaging methods require specialized facilities and equipment. These facilities also require specialized staff to operate said equipment. Unfortunately, these facilities are not always readily available and thus MRI and CT techniques are not always readily available to the medical practitioner. Brain trauma often occurs far away from medical facilities such as in war zones and in underdeveloped regions throughout the world. Neurological evaluations of a subject, including assessments of vision, hearing, balance, coordination, and reflexes often times don't signal significant trauma has occurred. In the case of Cogitative testing, the assessment is based on subject answers and can be manipulated by the subject to avoid a negative outcome to the assessment. This is especially prevalent among military and athletes who see suspected brain trauma as a negative hindrance, and even nuisance, to performing their job or sport. The present invention seeks to improve diagnostic accuracy, speed of diagnosis, and lessen the financial burned on medical systems and the patient through the use of a simple diagnostic test to diagnose, categorize, and/or monitor brain trauma using biomarkers found in ocular secretions of a subject known to suspected to have suffered brain trauma. Brain trauma includes, but is not limited to, Concussion, Traumatic Brain Injury, hemorrhage, Hematoma, Skull Fracture, Diffuse Axonal Injury, stroke, and Edema.

[0018] Neurodegenerative diseases are conditions which affect the neurons in the human brain causing neurological deficits. (Prusiner, 2001) While many, if not all of these diseases, are presently incurable, treatment options are increased if the disease is caught early in its progression. Some of these disorders often target the geriatric population but can manifest in all age groups and demographics. Unfortunately, diagnosis of neurodegenerative disorders often times is not confirmed until after the subject's death. Examples of neurodegenerative diseases include, but are not limited to, Alzheimer's disease, Amyotrophic lateral sclerosis (ALS), Dementia, Friedreich's ataxia, Huntington's disease, Lewy Body Disease, Motor neuron disease, Parkinson's disease, Parkinson's disease related disorders, Prion disease, Spinocerebellar ataxia (SCA), and Spinal muscular atrophy.

[0019] Diagnosing and treating mental health disorders is a complex process which often times takes a significant amount of time to provide and accurate diagnosis. Similarities in symptoms between multiple disorders can obscure the underlying malady delaying treatment or indicating incorrect treatment techniques. Treatment options vary for each individual disorder therefore obtaining an accurate early diagnosis will allow the clinician to select the most effective treatment regime, rather than a trial and error process which often reduces patient compliance. Mental health disorders cover a wide range of potential maladies as outlined in the “Diagnostic and Statistical Manual of Mental Disorders Fifth Edition” (DSM-5) including: Amphetamine Dependence, Anorexia nervosa, Anxiety disorder, Asperger's Disorder, Attention-deficit hyperactivity disorder (ADHD), Autism spectrum disorder, Binge Eating Disorder, Bipolar Disorder, Borderline Personality disorder, Bulimia Nervosa, Cognitive disorders, Delirium, Dementia, Depression, Dissociative Amnesia, Dissociative Disorders Dissociative Identity Disorder, Dyspareunia, Dyssomnias, Erectile Disorder, Generalized Anxiety disorder, Impulse Control Disorder, Major Depressive Disorder (MDD), Obsessive-compulsive disorder (OCD), Panic Disorder, Parasomnias, Personality Disorders, Pervasive Developmental Disorder, Postpartum Depression, Posttraumatic Stress Disorder (PTSD), Psychosis, Schizophrenia, Seasonal Affective Disorder, Social Anxiety, Somatoform Disorders, substance abuse, and Tourette's disorder. Given the broad range of maladies which fall under the auspices of mental disorders, as outlined in the DSM 5, the term “mental disorder” is a general term covering a large number of maladies. The meaning of “mental disorder” as used throughout this disclosure is defined as “clinically significant behavior or psychological syndrome or pattern that occurs in an individual and that is associated with present distress (e.g., a painful symptom) or disability (i.e., impairment in one of more important areas of functioning) or with a significantly increased risk of suffering death, pain, disability, or an important loss of freedom” as outlined in the Diagnostic and Statistical Manual of Mental Disorders Fourth Edition (DSM-4).

[0020] Provided herein is a method to use biomarkers obtained from ocular secretions in diagnostic applications for brain related maladies. The biomarkers of interest are provided in Table 1.

[0021] The biomarkers, comprised of the proteins and protein fragments, shown in table 1 are shown in the subsequent embodiments to either increase or decrease in ocular fluid samples of a subject compared to a control group composed of subjects known to be absent of a given medical malady or disorder. These biomarkers will be used to determine the disease sate of a patient or other subject.

[0022] In one embodiment, the present invention utilizes collected ocular fluid, obtained through the use of Schirmer Tear Flow Test Strips or other absorbing material which is capable of absorbing the fluid present on the surface of the eye along with cellular material from the Conjunctiva, as the sample media. After collection, the sample is subjected to analysis for the presence and/or quantification of biomarkers present. The specific biomarkers of interest are shown in Table 1. In this embodiment, the detection and/or quantification of target biomarkers present in the sample is measured utilizing Enzyme-linked Immunosorbent Assay (ELISA). The resulting biomarker concentration is compared to a threshold value determined based on analysis of control samples obtained from healthy donors. For some biomarkers, an increase in value as compared to control samples, or upregulated, signal presence of an aforementioned disorder or injury. Likewise for some biomarkers a decrease in value as compared to control samples, or downregulated, signal presence of a target disorder. For a given malady, single or multiple biomarkers could be required to provide a suitable level of selectivity, specificity, and sensitivity. The biomarkers can be analyzed in parallel with other analytes or could be performed with single or multiple analytes of interest. The number of biomarkers, outlined in Table 1, required to screen, diagnose, monitor, or quantify a given malady can range from two to greater than 50. Most preferably the number of biomarkers required for a positive indication is less than five.

[0023] In yet another embodiment, the present invention is used in a medical clinic, emergency room, hospital, pediatric office, athletic training room, battlefield hospital or, military installation by a nurse, doctor, medic, athletic trainer, parent, police officer, fireman, or Emergency Medical Technician (EMT). This is ideally used when a patient presents with a suspected but unknown brain related malady. In this embodiment a single sample is analyzed for a larger number of biomarkers at once. This allows for a screening of a large number of potential disorders in a short period of time which will expedite the treatment for the patient. Sample collection consists of the procedure outlined above. The isolated sample is then subjected to an immunological assay. In this embodiment, the assay looks at a large number of biomarkers at a given time, as the biomarkers of interest are unknown since the brain malady is not known but the patient is suspected of having one. The immunological assay can be conducted using a number of immunological techniques known in the field including, but not limited to, ELISA, lateral flow immunoassay, or protein microarray. Each biomarker concentration is measured independently. The results are compared to control values of a given biomarker in a healthy individual. Analysis of each biomarker analyzed will provide information as to what, if any, brain related maladies a patient has. Once each biomarker has been quantified for a given sample, the values will be compared to biomarker levels in patients with known brain maladies. Biomarkers showing increased or decreased concentrations in the sample as compared to established levels in healthy populations, upregulated or downregulated respectively, will yield information into possible brain maladies. For a given brain related condition, such as depression, a single biomarker may be sufficient to provide adequate specificity and sensitivity for an accurate diagnosis, however multiple biomarkers each showing specific up or down regulated properties may be required.

[0024] In another embodiment the aforementioned analysis of ocular fluids for biomarkers found in Table 1 can be used to first detect suspected brain trauma, as outlined above, and then quantify the severity of said traumatic injury. This is especially helpful for potential TBI or Concussion related injuries as early diagnosis or detection is beneficial for treatment of said disorders. The physical proximity of the ocular cavity to the brain allows for fast detection of trauma related biomarkers in the event of an injury or suspected injury. Conformation of a previous diagnosis is also provided by this invention as is the ability to monitor the progression of a given disorder with time based on changes in the quantified biomarker concentrations found in the ocular samples. For maladies such as CTE, which currently can only be diagnosed postmortem, the ability to diagnose prior to death allows for potentially lifesaving treatments.

[0025] In another embodiment, the detection or quantification of disorder related biomarkers outlined in Table 1 is accomplished through the use of an immunological assay such as lateral flow or protein microarray. In this embodiment, selected biomarkers are detected through the use of biomarker, or analyte, specific antibodies which bind to the biomarker, or analyte, of interest. In the preferred embodiment, a sandwich assay is performed in which the analyte is captured between two analyte specific antibodies. For both lateral flow and protein microarray applications one antibody, termed capture antibody, is immobilized on a substrate. Upon introduction of the sample either by direct application to the substrate, as in protein microarray, or via lateral flow through a nitrocellulose membrane, as in lateral flow assays, the immobilized antibodies bind to the analyte of interest, in the present case biomarkers found in Table 1, if they are present in the sample. A second analyte specific antibody is conjugated to a visual indicator to allow for visual quantification or detection of said analyte. This antibody equipped with an indicator molecule is often termed “conjugate” for lateral flow applications. The visual indicator is generally colloidal gold or latex microspheres. Other indicators of interest are colloidal nanocrystals, magnetic nanoparticles, and organic dyes. The indicator preferably is colored or emits light in the visible, ultra-violet, or infra-red region of the electromagnetic spectrum. Fluorescent indicators are also if interest and can be utilized in this embodiment, especially for protein microarray. A lateral flow assay in which the biomarkers from Table 1 are detected or quantified has significant application in the emergency medical community as a fast and easy diagnostic tool.

[0026] In another embodiment, the biomarkers, taken singularly or in multiples, from those listed in table 1 are quantified in a given sample using a method previously described (generally an immunoassay). The results of said quantification is input into a mathematical algorithm. The output of said algorithm is a numerical likelihood that the subject has or does not have the brain related malady of interest. The aforementioned algorithm is developed by comparing the levels of each biomarker of interest to those found in samples taken from subjects known to be free of the brain related malady of interest. In some cases the levels of biomarkers detected will be upregulated, or increased, compared to control samples (samples taken from subjects known to be free of the target brain related malady or disorder). In other cases the levels of biomarkers of interest are down regulated, or lower than those of a control sample. In addition to quantified values of biomarker concentrations, other variables can be incorporated into said algorithm, such as age, family history, previous medical diagnosis, and other medical conditions. It would be obvious to one ordinary skilled in the art that this list is not all encompassing but rather representative examples of additional variable related to the subject which could be incorporated into said algorithm.

[0027] Treating brain related maladies includes, but is not limited to, reducing the number of symptoms, reducing the duration of symptoms, or reducing the need for further treatment in a subject. Treating a subject, as used herein, refers to any type of treatment that imparts a benefit to a subject afflicted with a disease or at risk of developing the disease, including improvement in the condition of the subject for example in one or more symptoms, delay in the progression of the disease, delay in the onset of symptoms, or delay in the progression of symptoms, etc.

[0028] The methods of the versions of this invention include detecting at least one biomarker. However, any number of biomarkers can be detected. It is preferred that at least two biomarkers are detected in the analysis. However, it is realized that three, four, or more, including all, of the biomarkers described herein can be utilized in the analysis. Thus, not only can one or more markers be detected, any number or combination of markers can be used in detection. In addition, other biomarkers not herein described can be combined with any of the presently disclosed biomarkers to aid in the diagnosis of a brain related malady. Moreover, any combination of the above biomarkers can be detected in accordance with versions of the present invention.

### Example 1

### Methods and Results for Label Free Quantitation by LC MS/MS

[0029] In solution trypsin digestion followed by LC MS/MS was carried out on 25 breast cancer samples, 25 benign samples, and 25 control samples by the Proteomic Core at the University of Arkansas for Medical Sciences (UAMS). Solution digests were carried out on all 75 samples in 100 mM ammonium bicarbonate (SigmaAldrich), following reduction in 10 mM Tris[2-carboxyethyl]phosphine (Pierce) and alkylation in 50 mM iodoacetamide (Sigma-Aldrich), by addition of 100 ng porcine trypsin (Promega) and incubation at 37° C. for 12-16 hours. Peptide products were then acidified in 0.1% formic acid (Fiuka). Tryptic peptides were separated by reverse phase Jupiter Proteo resin (Phenomenex) on a 100×0.075 mm column using a nanoAcquity UPLC system (Waters). Peptides were eluted using an 80 min gradient from 97:3 to 35:65 buffer A:B ratio. [Buffer A=0.1% formic acid, 0.05% acetonitrile; buffer B=0.1% formic acid, 75% acetonitrile.] Eluted peptides were ionized by electrospray (1.8 kV) followed by MS/MS analysis using collision-induced dissociation on an LTQ Orbitrap Velos mass spectrometer (Thermo). MS data were acquired using the FTMS analyzer in profile mode at a resolution of 60,000 over a range of 375 to 1500 m/z.

[0030] MS/MS data were acquired for the top 15 peaks from each MS scan using the ion trap analyzer in centroid mode and normal mass range with a normalized collision energy of 35.0. Proteins were identified from MS/MS spectra by database searching the Mascot search engine (Matrix Science) or MaxQuant quantitative proteomics software (Max Planck′ Institute). Mascot search results were compiled using Scaffold (Proteome Software). The following criteria were set to select a group of proteins that can be indicative of altered medical state of interest: 1) protein has a fold change of 1.5 or greater (in either positive or negative direction with respect to cancer). 2) fold change should be accompanied by p value of <0.05. 3) protein is present in 12 out of the 25 cancer samples. Using these criteria, the list of over 500 was reduced to the proteins found in Table 1.

### Example 2

[0031] Ocular fluid and blood samples were compared using exploratory microarray panels, a high-throughput ELISA based antibody array that gives qualitative/semi-quantitative protein expression profiling. This panel compared biomarker concentrations in ocular fluid with blood samples from the same subject to determine a fold change for over 500 proteins. Using traditional venipuncture procedures, 12 mls of blood was collected using an EDTA containing Vacutainer® (purple top tube). The sample was centrifuged for 15 minutes at 2500 RPM. The plasma was removed from the sample and placed into a sterile vial. Ocular fluid was collected using a Schirmer tear flow test strip (Ophthalmic diagnostic strip), the Schirmer strip was placed into a patient's lower eyelid for 5 minutes. The Schirmer was then removed and placed into a sterile vial containing buffer.

[0032] Two different types of arrays were used for this study, the first one detecting biomarkers associated with various cancer types, while the second detecting a wide range of biomarkers from multiple signaling pathways. Both of these arrays require 80-150 μg of protein, easily obtained from blood (plasma) or ocular fluid. Samples were placed onto microarray slides containing antibodies to proteins of interest, after incubation and washing the slides a fluorescent labeling dye was used as detection. The slides were scanned using a microarray scanner and analysis is achieved using image quantification software. Fold changes were determined by comparing each protein on the slides (ocular fluid array compared to plasma array). Results of selected biomarkers are shown in Table 2 demonstrating the increased fold change in ocular fluid over blood for a number of biomarkers of interest in brain related maladies.

TABLE 2
Biomarkers observed in Brain Maladies

| Biomarker | Tear:Blood¹ | Disease/Disorder |
|---|---|---|
| TIMP1 | 1.21 | Major depressive disorder² |
| IL-6 | 1.15 | Depression³ |
| Metalloproteinase -7 | 1.26 | Bipolar disorder⁴ |
| Insulin | 1.06 | Major depressive disorder² |
| Prolactin | 0.82 (receptor 9.19) | Major depressive disorder⁵ |
| TNF alpha receptor II | 1.09 | Major depressive disorder⁵ |

¹Data obtained by Inventors
²Dominca(2010)
³Jehn(2006)
⁴Fryer(2015
⁵Papakostas(2013)

[0033] It will be appreciated by those persons skilled in the art that variations and/or alterations could be made to the invention without varying from the scope or spirt of the present inventions described broadly. The presented embodiments are to be considered in all aspects as illustrative and not restrictive. All references cited herein are incorporated by reference to the maximum extent allowable by law.

### REFERENCES

[0034] American Psychiatric Association. (2013). Diagnostic and statistical manual of menial disorders (DSM-5®). American Psychiatric Pub.
[0035] American Psychiatric Association, 2000). Diagnostic and statistical manual of mental disorders (revised 4th ed.). American Psychiatric Pub
[0036] Daily, A., Rutherford, L. (2015). U.S. patent application Ser. No. 14/879,982.
[0037] Daily, A., Rutherford, L. (2015). U.S. patent application Ser. No. 14/707,089
[0038] Domenici, Enrico, Wille, D. R., Tozzi, F. Propokpenko, I., Miller, S., McKeown, A., Brittain, C., Rujescu, D., giegling, I., Turck, C., Holsboer, F., Bullmore, E., Middleton, L., Merlo-Pich, E., Alexander, R., Muglia, P., (2010) Plasma Protein Biomarkers for Depression and Schizophrenia by Multi Analyte Profiling of Case-Control Collections. PLOS ONE, 5(2), e9166.
[0039] Friedlander, R. M. (2003). Apoptosis and Caspases in Neurodegenerative Diseases. New England Journal of Medicine, 348(14), 1365-1375.
[0040] Frye, M. A., Nassan, M., Jenkins, G D., Kung., S., Veldic, M., Palmer, B A., Feeder, S E., Tye, S J., Choi, D S., Biernacka, J M., (2015). Feasibility of investigating differential proteomic expression in depression: implications for biomarker development in mood disorders., Transl Psychiatry. 5. 1-5.
[0041] Jehn, C F., Kuehnhardt, D., Bartholomae, A., Pfeiffer, S., Krebs, M., Regierer, A. C., Schmid, P., Possinger, K., Flath, B. C., (2006), Biomarkers of Depression in Cancer Patients., Cancer 107(11), 2723-2729.
[0042] Papakostas, G I., Shelton, R C., Kinrys, G., Henry, M E., Bakow, B R., Lipkin, S H., Pi, B., Thurmond, L., Bilello, J A. (2013), Assessment of a multi-assay, serum-based biological diagnostic test for major depressive disorder: a Pilot and Replication Study. Molecular Psychiatry, 18, 332-339.
[0043] Prusiner, S. B. (2001). Neurodegenerative Diseases and Prions. New England Journal of Medicine, 344(20), 1516-1526.
[0044] Seeley, W, Crawford, R. K., Zhou, J, Miller, B. L., Greicius, M. (2009). Neurodegenerative Diseases Target Large-Scale Human Brain Networks. Neuron, 62(1), 42-52.

What is claimed:

1. A method of determining if a subject has a brain related disorder comprising:
a. obtaining a sample of ocular fluid from a subject,
b. measuring levels in the sample of at least one of the biomarkers from the list provided in Table 1,
c. determining if the subject has, or is likely to have, a brain related disorder if the levels of the biomarker change as compared to levels in a control sample known to be absent of said brain related disorder.

2. The method of claim 1, wherein the brain related disorder is caused by a physical injury to the head or brain.

3. The method of claim 1, wherein the brain related disorder is a neurodegenerative disease.

4. The method of claim 1, wherein the brain related disorder is a mental illness.

5. The method of claim 1, wherein the subject is human.

6. The method of claim 1, wherein the subject is known to have a brain related disorder.

7. The method of claim 1 wherein said subject is being monitored for reoccurrence of said brain related disorder

8. The method of claim 1, wherein said subject is being evaluated for efficacy of a medical treatment for said brain related disorder.

9. The method of claim 1, wherein the biomarkers are decreased at least 1.5 fold, 2 fold, 4 fold, 8 fold or more relative to the level of said control sample.

10. The method of claim 1, wherein the biomarkers are increased at least 1.5 fold, 2 fold, 4 fold, 8 fold, or more relative to the level of said control sample.

11. The method of claim 1, wherein a portion of the biomarkers are increased at least 1.5 fold, 2 fold, 4 fold, 8 fold or more relative to the level of said control sample and a portion of the biomarkers are decreased at least 1.5 fold, 2 fold, 4 fold, 8 fold or more relative to the level of said control sample.

12. The method of claim 1 wherein a combination of biomarkers taken from Table 1 are used to determine the likelihood a subject has a brain related disorder.

13. The method of claim 1 wherein the level of the marker is detected by an antibody-based detection method or mass spectrometry.

14. The method of claim 1 wherein the level of biomarker is detected by multiplex protein detection method.

15. The method of claim 1, wherein the subject is at an increased risk of having or developing a brain related disorder.

16. The method of claim 1, wherein at least 3 biomarkers are used in combination

17. The method of claim 1 wherein at least 5 biomarkers are used in combination.

18. The method of claim 1, wherein at least 10 biomarkers are used in combination.

19. The method of claim 1 wherein determined levels of said biomarker or biomarkers are input into an algorithm.

20. The algorithm of claim 19 wherein the output from said algorithm is a probability a subject has the brain related disorder of interest.

The application's sequence listing, which the Patent Office published only in electronic form, follows.

SEQUENCE LISTING (435 sequences)

SEQ ID NO: 1 - protein, 599 aa, Homo sapiens
MKLLKLTGFIFFLFFLTESLTLPTQPRDIENFNSTQKFIEDNIEYITIIAFAQYVQEATFEEMEKLVKDMVEYKDRCMADKTLPECSKLPNNVLQEKICAMEGLPQKHNFSHCCSKVDAQRRLCFFYNKKSDVGFLPPFPTLDPEEKCQAYESNRESLLNHFLYEVARRNPFVFAPTLLTVAVHFEEVAKSCCEEQNKVNCLQTRAIPVTQYLKAFSSYQKHVCGALLKFGTKVVHFIYIAILSQKFPKIEFKELISLVEDVSSNYDGCCEGDVVQCIRDTSKVMNHICSKQDSISSKIKECCEKKIPERGQCIINSNKDDRPKDLSLREGKFTDSENVCQERDADPDTFFAKFTFEYSRRHPDLSIPELLRIVQIYKDLLRNCCNTENPPGCYRYAEDKFNETTEKSLKMVQQECKHFQNLGKDGLKYHYLIRLTKIAPQLSTEELVSLGEKMVTAFTTCCTLSEEFACVDNLADLVFGELCGVNENRTINPAVDHCCKTNFAFRRPCFESLKADKTYVPPPFSQDLFTFHADMCQSQNEELQRKTDRFLVNLVKLKHELTDEELQSLFTNFANVVDKCCKAESPEVCFNEESPKIGN

SEQ ID NO: 2 - protein, 93 aa, Homo sapiens
MLTELEKALNSIIDVYHKYSLIKGNFHAVYRDDLKKLLETECPQYIRKKGADVWFKELDINTDGAVNFQEFLILVIKMGVAAHKKSHEESHKE

SEQ ID NO: 3 - protein, 114 aa, Homo sapiens
MTCKMSQLERNIETIINTFHQYSVKLGHPDTLNQGEFKELVRKDLQNFLKKENKNEKVIEHIMEDLDTNADKQLSFEEFIMLMARLTWASHEKMHEGDEGPGHHHKPGLGEGTP

SEQ ID NO: 4 - protein, 126 aa, Homo sapiens
MADEIAKAQVARPGGDTIFGKIIRKEIPAKIIFEDDRCLAFHDISPQAPTHFLVIPKKHISQISVAEDDDESLLGHLMIVGKKCAADLGLNKGYRMVVNEGSDGGQSVYHVHLHVLGGRQMHWPPG

SEQ ID NO: 5 - protein, 250 aa, Homo sapiens [sequence omitted]

SEQ ID NO: 6 - protein, 353 aa, Homo sapiens
ASPTSPKVFPLSLCSTQPDGNVVIACLVQGFFPQEPLSVTWSESGQGVTARNFPPSQDASGDLYTTSSQLTLPATQCLAGKSVTCHVKHYTNPSQDVTVPCPVPSTPPTPSPSTPPTPSPSCCHPRLSLHRPALEDLLLGSEANLTCTLTGLRDASGVTFTWTPSSGKSAVQGPPERDLCGCYSVSSVLPGCAEPWNHGKTFTCTAAYPESKTPLTATLSKSGNTFRPEVHLLPPPSEELALNELVTLTCLARGFSPKDVLVRWLQGSQELPREKYLTWASRQEPSQGTTTFAVTSILRVAAEDWKKGDTFSCMVGHEALPLAFTQKTIDRLAGKPTHVNVSVVMAEVDGTCY

SEQ ID NO: 7 - protein, 334 aa, Homo sapiens
MATLKEKLIAPVAEEEATVPNNKITVVGVGQVGMACAISILGKSLADELALVDVLEDKLKGEMMDLQHGSLFLQTPKIVADKDYSVTANSKIVVVTAGVRQQEGESRLNLVQRNVNVFKFIIPQIVKYSPDCIIIVVSNPVDILTYVTWKLSGLPKHRVIGSGCNLDSARFRYLMAEKLGIHPSSCHGWILGEHGDSSVAVWSGVNVAGVSLQELNPEMGTDNDSENWKEVHKMVVESAYEVIKLKGYTNWAIGLSVADLIESMLKNLSRIHPVSTMVKGMYGIENEVFLSLPCILNARGLTSVINQKLKDDEVAQLKKSADTLWDIQKDLKDL

SEQ ID NO: 8 - protein, 332 aa, Homo sapiens
MATLKDQLIYNLLKEEQTPQNKITVVGVGAVGMACAISILMKDLADELALVDVIEDKLKGEMMDLQHGSLFLRTPKIVSGKDYNVTANSKLVIITAGARQQEGESRLNLVQRNVNIFKFIIPNVVKYSPNCKLLIVSNPVDILTYVAWKISGFPKNRVIGSGCNLDSARFRYLMGERLGVHPLSCHGWVLGEHGDSSVPVWSGMNVAGVSLKTLHPDLGTDKDKEQWKEVHKQVVESAYEVIKLKGYTSWAIGLSVADLAESIMKNLRRVHPVSTMIKGLYGIKDDVFLSVPCILGQNGISDLVKVTLTSEEEARLKKSADTLWGIQKELQF

SEQ ID NO: 9 - protein, 119 aa, Homo sapiens
MKVLISSLLLLLPLMLMSMVSSSLNPGVARGHRDRGQASRRWLQEGGQECECKDWFLRAPRRKFMTVSGLPKKQCPCDHFKGNVKKTRHQRHHRKPNKHSRACQQFLKQCQLRSFALPL

SEQ ID NO: 10 - protein, 116 aa, Homo sapiens
METPAQLLFLLLLWLPDTTGEIVLTQSPGTLSLSPGERATLSCRASQSVSSSYLAWYQQKPGQAPRLLIYGASSRATGIPDRFSGSGSGTDFTLTISRLEPEDFAVYYCQQYGSSP

SEQ ID NO: 11 - protein, 501 aa, Homo sapiens
MSSSGTPDLPVLLTDLKIQYTKIFINNEWHDSVSGKKFPVFNPATEEELCQVEEGDKEDVDKAVKAARQAFQIGSPWRTMDASERGRLLYKLADLIERDRLLLATMESMNGGKLYSNAYLNDLAGCIKTLRYCAGWADKIQGRTIPIDGNFFTYTRHEPIGVCGQIIPWNFPLVMLIWKIGPALSCGNTVVVKPAEQTPLTALHVASLIKEAGFPPGVVNIVPGYGPTAGAAISSHMDIDKVAFTGSTEVGKLIKEAAGKSNLKRVTLELGGKSPCIVLADADLDNAVEFAHHGVFYHQGQCCIAASRIFVEESIYDEFVRRSVERAKKYILGNPLTPGVTQGPQIDKEQYDKILDLIESGKKEGAKLECGGGPWGNKGYFVQPTVFSNVTDEMRIAKEEIFGPVQQIMKFKSLDDVIKRANNTFYGLSAGVFTKDIDKAITISSALQAGTVWVNCYGVVSAQCPFGGFKMSGNGRELGEYGFHEYTEVKTVTVKISQKNS

SEQ ID NO: 12 - protein, 423 aa, Homo sapiens
MERMLPLLALGLLAAGFCPAVLCHPNSPLDEENLTQENQDRGTHVDLGLASANVDFAFSLYKQLVLKAPDKNVIFSPLSISTALAFLSLGAHNTTLTEILKGLKFNLTETSEAEIHQSFQHLLRTLNQSSDELQLSMGNAMFVKEQLSLLDRFTEDAKRLYGSEAFATDFQDSAAAKKLINDYVKNGTRGKITDLIKDLDSQTMMVLVNYIFFKAKWEMPFDPQDTHQSRFYLSKKKWVMVPMMSLHHLTIPYFRDEELSCTVVELKYTGNASALFILPDQDKMEEVEAMLLPETLKRWRDSLEFREIGELYLPKFSISRDYNLNDILLQLGIEEAFTSKADLSGITGARNLAVSQVVHKAVLDVFEEGTEASAATAVKITLLSALVETRTIVRFNRPFLMIIVPTDTQNIFFMSKVTNPKQA

SEQ ID NO: 13 - protein, 664 aa, Homo sapiens
MKTGLFFLCLLGTAAAIPTNARLLSDHSKPTAETVAPDNTAIPSLRAEAEENEKETAVSTEDDSHHKAEKSSVLKSKEESHEQSAEQGKSSSQELGLKDQEDSDGHLSVNLEYAPTEGTLDIKEDMSEPQEKKLSENTDFLAPGVSSFTDSNQQESITKREENQEQPRNYSHHQLNRSSKHSQGLRDQGNQEQDPNISNGEEEEEKEPGEVGTHNDNQERKTELPREHANSKQEEDNTQSDDILEESDQPTQVSKMQEDEFDQGNQEQEDNSNAEMEEENASNVNKHIQETEWQSQEGKTGLEAISNHKETEEKTVSEALLMEPTDDGNTTPRNHGVDDDGDDDGDDGGTDGPRHSASDDYFIPSQAFLEAERAQSIAYHLKIEEQREKVHENENIGTTEPGEHQEAKKAENSSNEEETSSEGNMRVHAVDSCMSFQCKRGHICKADQQGKPHCVCQDPVTCPPTKPLDQVCGTDNQTYASSCHLFATKCRLEGTKKGHQLQLDYFGACKSIPTCTDFEVIQFPLRMRDWLKNILMQLYEANSEHAGYLNEKQRNKVKKIYLDEKRLLAGDHPIDLLLRDFKKNYHMYVYPVHWQFSELDQHPMDRVLTHSELAPLRASLVPMEHCITRFFEECDPNKDKHITLKEWGHCFGIKEEDIDENLLF

SEQ ID NO: 14 - protein, 117 aa, Homo sapiens
MEFGLSWLFLVAILKGVQCEVQLVESGGGLVQPGGSLRLSCAASGFTFSSYAMSWVRQAPGKGLEWVSAISGSGGSTYYADSVKGRFTISRDNSKNTLYLQMNSLRAEDTAVYYCAK

SEQ ID NO: 15 - protein, 505 aa, Homo sapiens
MTCGSGFGGRAFSCISACGPRPGRCCITAAPYRGISCYRGLTGGFGSHSVCGGFRAGSCGRSFGYRSGGVCGPSPPCITTVSVNESLLTPLNLEIDPNAQCVKQEEKEQIKSLNSRFAAFIDKVRFLEQQNKLLETKLQFYQNRECCQSNLEPLFEGYIETLRREAECVEADSGRLASELNHVQEVLEGYKKKYEEEVSLRATAENEFVALKKDVDCAYLRKSDLEANVEALIQEIDFLRRLYEEEILILQSHISDTSVVVKLDNSRDLNMDCIIAEIKAQYDDIVTRSRAEAESWYRSKCEEMKATVIRHGETLRRTKEEINELNRMIQRLTAEVENAKCQNSKLEAAVAQSEQQGEAALSDARCKLAELEGALQKAKQDMACLIREYQEVMNSKLGLDIEIATYRRLLEGEEQRLCEGIGAVNVCVSSSRGGVVCGDLCVSGSRPVTGSVCSAPCNGNVAVSTGLCAPCGQLNTTCGGGSCGVGSCGISSLGVGSCGSSCRKC

SEQ ID NO: 16 - protein, 141 aa, Homo sapiens
MAQYLSTLLLLLATLAVALAWSPKEEDRIIPGGIYNADLNDEWVQRALHFAISEYNKATKDDYYRRPLRVLRARQQTVGGVNYFFDVEVGRTICTKSQPNLDTCAFHEQPELQKKQLCSFEIYEVPWENRRSLVKSRCQES

SEQ ID NO: 17 - protein, 911 aa, Homo sapiens
MVDYHAANQSYQYGPSSAGNGAGGGGSMGDYMAQEDDWDRDLLLDPAWEKQQRKTFTAWCNSHLRKAGTQIENIDEDFRDGLKLMLLLEVISGERLPKPERGKMRVHKINNVNKALDFIASKGVKLVSIGAEEIVDGNAKMTLGMIWTIILRFAIQDISVEETSAKEGLLLWCQRKTAPYKNVNVQNFHISWKDGLAFNALIHRHRPELIEYDKLRKDDPVTNLNNAFEVAEKYLDIPKMLDAEDIVNTARPDEKAIMTYVSSFYHAFSGAQKAETAANRICKVLAVNQENEHLMEDYEKLASDLLEWIRRTIPWLEDRVPQKTIQEMQQKLEDFRDYRRVHKPPKVQEKCQLEINFNTLQTKLRLSNRPAFMPSEGKMVSDINNGWQHLEQAEKGYEEWLLNEIRRLERLDHLAEKFRQKASIHEAWTDGKEAMLKHRDYETATLSDIKALIRKHEAFESDLAAHQDRVEQIAAIAQELNELDYYDSHNVNTRCQKICDQWDALGSLTHSRREALEKTEKQLEAIDQLHLEYAKRAAPFNNWMESAMEDLQDMFIVHTIEEIEGLISAHDQFKSTLPDADREREAILAIHKEAQRIAESNHIKLSGSNPYTTVTPQIINSKWEKVQQLVPKRDHALLEEQSKQQSNEHLRRQFASQANVVGPWIQTKMEEIGRISIEMNGTLEDQLSHLKQYERSIVDYKPNLDLLEQQHQLIQEALIFDNKHTNYTMEHIRVGWEQLLTTIARTINEVENQILTRDAKGISQEQMQEFRASFNHFDKDHGGALGPEEFKACLISLGYDVENDRQGEAEFNRIMSLVDPNHSGLVTFQAFIDFMSRETTDTDTADQVIASFKVLAGDKNFITAEELRRELPPDQAEYCIARMAPYQGPDAVPGALDYKSFSTALYGESDL

SEQ ID NO: 18 - protein, 214 aa, Homo sapiens
MRPKTGQVGCETPEELGPGPRQRWPLLLLGLAMVAHGLLRPMVAPQSGDPDPGASVGSSRSSLRSLWGRLLLQPSPQRADPRCWPRGFWSEPQSLCYVFGTGTKVTVLGQPKANPTVTLFPPSSEELQANKATLVCLISDFYPGAVTVAWKADGSPVKAGVETTKPSKQSNNKYAASSYLSLTPEQWKSHRSYSCQVTHEGSTVEKTVAPTECS

SEQ ID NO: 19 - protein, 104 aa, Homo sapiens
QPKSTPTLTMFPPSPEELQENKATLVCLISNFSPSGVTVAWKANGTPITQGVDTSNPTKEDNKYMASSFLHLTSDQWRSHNSFTCQVTHEGDTVEKSLSPAECL

SEQ ID NO: 20 - protein, 137 aa, Homo sapiens
MKFTTLLFLAAVAGALVYAEDASSDSTDADPAQEAGTSKPNEEISDPAASASPPETTTTAQETSAAVQGTAKVTSSRQELNPLKSIVEKSILLTEQAFARAGKGVPGGLAGGKQFIENGNEFAKKLLKKFGLPKPWA

SEQ ID NO: 21 - protein, 524 aa, Homo sapiens
MYALFLLASLLGAALAGPVLGLKECTRGSAVWCQNVKTASDCGAVKHCLQTVWNKPTVKSLPCDICKDVVTAAGDMLKDNATEEEILVYLEKTCDWLPKPNMSASCKEIVDSYLPVILDIIKGEMSRPGEVCSALNLCESLQKHLAELNHQKQLESNKIPELDMTEVVAPFMANIPLLLYPQDGPRSKPQPKDNGDVCQDCIQMVTDIQTAVRTNSTFVQALVEHVKEECDRLGPGMADICKNYISQYSEIAIQMMMHMQPKEICALVGFCDEVKEMPMQTLVPAKVASKNVIPALELVEPIKKHEVPAKSDVYCEVCEFLVKEVTKLIDNNKTEKEILDAFDKMCSKLPKSLSEECQEVVDTYGSSILSILLEEVSPELVCSMLHLCSGTRLPALTVHVTQPKDGGFCEVCKKLVGYLDRNLEKNSTKQEILAALEKGCSFLPDPYQKQCDQFVAEYEPVLIEILVEVMDPSFVCLKIGACPSAHKPLLGTEKCIWGPSYWCQNTETAAQCNAVEHCKRHVWN

SEQ ID NO: 22 - protein, 206 aa, Homo sapiens
MAVKKIAIFGATGQTGLTTLAQAVQAGYEVTVLVRDSSRLPSEGPRPAHVVVGDVLQAADVDKTVAGQDAVIVLLGTRNDLSPTTVMSEGARNIVAAMKAHGVDKVVACTSAFLLWDPTKVPPRLQAVTDDHIRMHKVLRESGLKYVAVMPPHIGDQPLTGAYTVTLDGRGPSRVISKHDLGHFMLRCLTTDEYDGHSTYPSHQYQ

SEQ ID NO: 23 - protein, 396 aa, Homo sapiens [sequence omitted]

SEQ ID NO: 24 - protein, 267 aa, Homo sapiens
MKAAVLTLAVLFLTGSQARHFWQQDEPPQSPWDRVKDLATVYVDVLKDSGRDYVSQFEGSALGKQLNLKLLDNWDSVTSTFSKLREQLGPVTQEFWDNLEKETEGLRQEMSKDLEEVKAKVQPYLDDFQKKWQEEMELYRQKVEPLRAELQEGARQKLHELQEKLSPLGEEMRDRARAHVDALRTHLAPYSDELRQRLAARLEALKENGGARLAEYHAKATEHLSTLSEKAKPALEDLRQGLLPVLESFKVSFLSALEEYTKKLNTQ

SEQ ID NO: 25 - protein, 326 aa, Homo sapiens
ASTKGPSVFPLAPCSRSTSESTAALGCLVKDYFPEPVTVSWNSGALTSGVHTFPAVLQSSGLYSLSSVVTVPSSNFGTQTYTCNVDHKPSNTKVDKTVERKCCVECPPCPAPPVAGPSVFLFPPKPKDTLMISRTPEVTCVVVDVSHEDPEVQFNWYVDGVEVHNAKTKPREEQFNSTFRVVSVLTVVHQDWLNGKEYKCKVSNKGLPAPIEKTISKTKGQPREPQVYTLPPSREEMTKNQVSLTCLVKGFYPSDISVEWESNGQPENNYKTTPPMLDSDGSFFLYSKLTVDKSRWQQGNVFSCSVMHEALHNHYTQKSLSLSPGK

SEQ ID NO: 26 - protein, 462 aa, Homo sapiens
MARVLGAPVALGLWSLCWSLAIATPLPPTSAHGNVAEGETKPDPDVTERCSDGWSFDATTLDDNGTMLFFKGEFVWKSHKWDRELISERWKNFPSPVDAAFRQGHNSVFLIKGDKVWVYPPEKKEKGYPKLLQDEFPGIPSPLDAAVECHRGECQAEGVLFFQGDREWFWDLATGTMKERSWPAVGNCSSALRWLGRYYCFQGNQFLRFDPVRGEVPPRYPRDVRDYFMPCPGRGHGHRNGTGHGNSTHHGPEYMRCSPHLVLSALTSDNHGATYAFSGTHYWRLDTSRDGWHSWPIAHQWPQGPSAVDAAFSWEEKLYLVQGTQVYVFLTKGGYTLVSGYPKRLEKEVGTPHGIILDSVDAAFICPGSSRLHIMAGRRLWWLDLKSGAQATWTELPWPHEKVDGALCMEKSLGPNSCSANGPGLYLIHGPNLYCYSDVEKLNAAKALPQPQNVTSLLGCTH

SEQ ID NO: 27 - protein, 622 aa, Homo sapiens
MAHVRGLQLPGCLALAALCSLVHSQHVFLAPQQARSLLQRVRRANTFLEEVRKGNLERECVEETCSYEEAFEALESSTATDVFWAKYTACETARTPRDKLAACLEGNCAEGLGTNYRGHVNITRSGIECQLWRSRYPHKPEINSTTHPGADLQENFCRNPDSSTTGPWCYTTDPTVRRQECSIPVCGQDQVTVAMTPRSEGSSVNLSPPLEQCVPDRGQQYQGRLAVTTHGLPCLAWASAQAKALSKHQDFNSAVQLVENFCRNPDGDEEGVWCYVAGKPGDFGYCDLNYCEEAVEEETGDGLDEDSDRAIEGRTATSEYQTFFNPRTFGSGEADCGLRPLFEKKSLEDKTERELLESYIDGRIVEGSDAEIGMSPWQVMLFRKSPQELLCGASLISDRWVLTAAHCLLYPPWDKNFTENDLLVRIGKHSRTRYERNIEKISMLEKIYIHPRYNWRENLDRDIALMKLKKPVAFSDYIHPVCLPDRETAASLLQAGYKGRVTGWGNLKETWTANVGKGQPSVLQVVNLPIVERPVCKDSTRIRITDNMFCAGYKPDEGKRGDACEGDSGGPFVMKSPFNNRWYQMGIVSWGEGCDRDGKYGFYTHVFRLKKWIQKVIDQFGE

SEQ ID NO: 28 - protein, 140 aa, Homo sapiens
MAGWNAYIDNLMADGTCQDAAIVGYKDSPSVWAAVPGKTFVNITPAEVGVLVGKDRSSFYVNGLTLGGQKCSVIRDSLLQDGEFSMDLRTKSTGGAPTFNVTVTKTDKTLVLLMGKEGVHGGLINKKCYEMASHLRRSQY

SEQ ID NO: 29 - protein, 175 aa, Homo sapiens
MEKIPVSAFLLLVALSYTLARDTTVKPGAKKDTKDSRPKLPQTLSRGWGDQLIWTQTYEEALYKSKTSNKPLMIIHHLDECPHSQALKKVFAENKEIQKLAEQFVLLNLVYETTDKHLSPDGQYVPRIMFVDPSLTVRADITGRYSNRLYAYEPADTALLLDNMKKALKLLKTEL

SEQ ID NO: 30 - protein, 103 aa, Homo sapiens
MSEEKPKEGVKTENDHINLKVAGQDGSVVQFKIKRHTPLSKLMKAYCERQGLSMRQIRFRFDGQPINETDTPAQLEMEDEDTIDVFQQQTGGVPESSLAGHSF

SEQ ID NO: 31 - protein, 347 aa, Homo sapiens
MSSWSRQRPKSPGGIQPHVSRTLFLLLLLAASAWGVTLSPKDCQVFRSDHGSSISCQPPAEIPGYLPADTVHLAVEFFNLTHLPANLLQGASKLQELHLSSNGLESLSPEFLRPVPQLRVLDLTRNALTGLPPGLFQASATLDTLVLKENQLEVLEVSWLHGLKALGHLDLSGNRLRKLPPGLLANFTLLRTLDLGENQLETLPPDLLRGPLQLERLHLEGNKLQVLGKDLLLPQPDLRYLFLNGNKLARVAAGAFQGLRQLDMLDLSNNSLASVPEGLWASLGQPNWDMRDGFDISGNPWICDQNLSDLYRWLQAQKDKMFSQNDTRCAGPEAVKGQTLLAVAKSQ

SEQ ID NO: 32 - protein, 495 aa, Homo sapiens
MSMLVVFLLLWGVTWGPVTEAAIFYETQPSLWAESESLLKPLANVTLTCQAHLETPDFQLFKNGVAQEPVHLDSPAIKHQFLLTGDTQGRYRCRSGLSTGWTQLSKLLELTGPKSLPAPWLSMAPVSWITPGLKTTAVCRGVLRGVTFLLRREGDHEFLEVPEAQEDVEATFPVHQPGNYSCSYRTDGEGALSEPSATVTIEELAAPPPPVLMHHGESSQVLHPGNKVTLTCVAPLSGVDFQLRRGEKELLVPRSSTSPDRIFFHLNAVALGDGGHYTCRYRLHDNQNGWSGDSAPVELILSDETLPAPEFSPEPESGRALRLRCLAPLEGARFALVREDRGGRRVHRFQSPAGTEALFELHNISVADSANYSCVYVDLKPPFGGSAPSERLELHVDGPPPRPQLRATWSGAVLAGRDAVLRCEGPIPDVTFELLREGETKAVKTVRTPGAAANLELIFVGPQHAGNYRCRYRSWVPHTFESELSDPVELLVAES

SEQ ID NO: 33 - protein, 418 aa, Homo sapiens
MPSSVSWGILLLAGLCCLVPVSLAEDPQGDAAQKTDTSHHDQDHPTFNKITPNLAEFAFSLYRQLAHQSNSTNIFFSPVSIATAFAMLSLGTKADTHDEILEGLNFNLTEIPEAQIHEGFQELLRTLNQPDSQLQLTTGNGLFLSEGLKLVDKFLEDVKKLYHSEAFTVNFGDTEEAKKQINDYVEKGTQGKIVDLVKELDRDTVFALVNYIFFKGKWERPFEVKDTEEEDFHVDQVTTVKVPMMKRLGMFNIQHCKKLSSWVLLMKYLGNATAIFFLPDEGKLQHLENELTHDIITKFLENEDRRSASLHLPKLSITGTYDLKSVLGQLGITKVFSNGADLSGVTEEAPLKLSKAVHKAVLTIDEKGTEAAGAMFLEAIPMSIPPEVKFNKPFVFLMIEQNTKSPLFMGKVVNPTQK

SEQ ID NO: 34 - protein, 146 aa, Homo sapiens
MAGELTPEEEAQYKKAFSAVDTDGNGTINAQELGAALKATGKNLSEAQLRKLISEVDSDGDGEISFQEFLTAAKKARAGLEDLQVAFRAFDQDGDGHITVDELRRAMAGLGQPLPQEELDAMIREADVDQDGRVNYEEFARMLAQE

SEQ ID NO: 35 - protein, 338 aa, Homo sapiens
MLSALARPASAALRRSFSTSAQNNAKVAVLGASGGIGQPLSLLLKNSPLVSRLTLYDIAHTPGVAADLSHIETKAAVKGYLGPEQLPDCLKGCDVVVIPAGVPRKPGMTRDDLFNTNATIVATLTAACAQHCPEAMICVIANPVNSTIPITAEVFKKHGVYNPNKIFGVTTLDIVRANTFVAELKGLDPARVNVPVIGGHAGKTIIPLISQCTPKVDFPQDQLTALTGRIQEAGTEVVKAKAGAGSATLSMAYAGARFVFSLVDAMNGKEGVVECSFVKSQETECTYFSTPLLLGKKGIEKNLGIGKVSSFEEKMISDAIPELKASIKKGEDFVKTLK

SEQ ID NO: 36 - protein, 320 aa, Homo sapiens
MAQVLRGTVTDFPGFDERADAETLRKAMKGLGTDEESILTLLTSRSNAQRQEISAAFKTLFGRDLLDDLKSELTGKFEKLIVALMKPSRLYDAYELKHALKGAGTNEKVLTEIIASRTPEELRAIKQVYEEEYGSSLEDDVVGDTSGYYQRMLVVLLQANRDPDAGIDEAQVEQDAQALFQAGELKWGTDEEKFITIFGTRSVSHLRKVFDKYMTISGFQIEETIDRETSGNLEQLLLAVVKSIRSIPAYLAETLYYAMKGAGTDDHTLIRVMVSRSEIDLFNIRKEFRKNFATSLYSMIKGDTSGDYKKALLLLCGEDD

SEQ ID NO: 37 - protein, 373 aa, Homo sapiens
MTTSASSHLNKGIKQVYMSLPQGEKVQAMYIWIDGTGEGLRCKTRTLDSEPKCVEELPEWNFDGSSTLQSEGSNSDMYLVPAAMFRDPFRKDPNKLVLCEVFKYNRRPAETNLRHTCKRIMDMVSNQHPWFGMEQEYTLMGTDGHPFGWPSNGFPGPQGPYYCGVGADRAYGRDIVEAHYRACLYAGVKIAGTNAEVMPAQWEFQIGPCEGISMGDHLWVARFILHRVCEDFGVIATFDPKPIPGNWNGAGCHTNFSTKAMREENGLKYIEEAIEKLSKRHQYHIRAYDPKGGLDNARRLTGFHETSNINDFSAGVANRSASIRIPRTVGQEKKGYFEDRRPSANCDPFSVTEALIRTCLLNETGDEPFQYKN

SEQ ID NO: 38 - protein, 847 aa, Homo sapiens
MAKPLTDQEKRRQISIRGIVGVENVAELKKSFNRHLHFTLVKDRNVATTRDYYFALAHTVRDHLVGRWIRTQQHYYDKCPKRVYYLSLEFYMGRTLQNTMINLGLQNACDEAIYQLGLDIEELEEIEEDAGLGNGGLGRLAACFLDSMATLGLAAYGYGIRYEYGIFNQKIRDGWQVEEADDWLRYGNPWEKSRPEFMLPVHFYGKVEHTNTGTKWIDTQVVLALPYDTPVPGYMNNTVNTMRLWSARAPNDFNLRDFNVGDYIQAVLDRNLAENISRVLYPNDNFFEGKELRLKQEYFVVAATLQDIIRRFKASKFGSTRGAGTVFDAFPDQVAIQLNDTHPALAIPELMRIFVDIEKLPWSKAWELTQKTFAYTNHTVLPEALERWPVDLVEKLLPRHLEIIYEINQKHLDRIVALFPKDVDRLRRMSLIEEEGSKRINMAHLCIVGSHAVNGVAKIHSDIVKTKVFKDFSELEPDKFQNKTNGITPRRWLLLCNPGLAELIAEKIGEDYVKDLSQLTKLHSFLGDDVFLRELAKVKQENKLKFSQFLETEYKVKINPSSMFDVQVKRIHEYKRQLLNCLHVITMYNRIKKDPKKLFVPRTVIIGGKAAPGYHMAKMIIKLITSVADVVNNDPMVGSKLKVIFLENYRVSLAEKVIPATDLSEQISTAGTEASGTGNMKFMLNGALTIGTMDGANVEMAEEAGEENLFIFGMRIDDVAALDKKGYEAKEYYEALPELKLVIDQIDNGFFSPKQPDLFKDIINMLFYHDRFKVFADYEAYVKCQDKVSQLYMNPKAWNTMVLKNIAASGKFSSDRTIKEYAQNIWNVEPSDLKISLSNESNKVNGN

SEQ ID NO: 39 - protein, 2017 aa, Homo sapiens
MSLGLARAQEVELTLETVIQTLESSVLCQEKGLGARDLAQDAQITSLPALIREIVTRNLSQPESPVLLPATEMASLLSLQEENQLLQQELSRVEDLLAQSRAERDELAIKYNAVSERLEQALRLEPGELETQEPRGLVRQSVELRRQLQEEQASYRRKLQAYQEGQQRQAQLVQRLQGKILQYKKRCSELEQQLLERSGELEQQRLRDTEHSQDLESALIRLEEEQQRSASLAQVNAMLREQLDQAGSANQALSEDIRKVTNDWTRCRKELEHREAAWRREEESFNAYFSNEHSRLLLLWRQVVGFRRLVSEVKMFTERDLLQLGGELARTSRAVQEAGLGLSTGLRLAESRAEAALEKQALLQAQLEEQLRDKVLREKDLAQQQMQSDLDKADLSARVTELGLAVKRLEKQNLEKDQVNKDLTEKLEALESLRLQEQAALETEDGEGLQQTLRDLAQAVLSDSESGVQLSGSERTADASNGSLRGLSGQRTPSPPRRSSPGRGRSPRRGPSPACSDSSTLALIHSALHKRQLQVQDMRGRYEASQDLLGTLRKQLSDSESERRALEEQLQRLRDKTDGAMQAHEDAQREVQRLRSANELLSREKSNLAHSLQVAQQQAEELRQEREKLQAAQEELRRQRDRLEEEQEDAVQDGARVRRELERSHRQLEQLEGKRSVLAKELVEVREALSRATLQRDMLQAEKAEVAEALTKAEAGRVELELSMTKLRAEEASLQDSLSKLSALNESLAQDKLDLNRLVAQLEEEKSALQGRQRQAEQEATVAREEQERLEELRLEQEVARQGLEGSLRVAEQAQEALEQQLPTLRHERSQLQEQLAQLSRQLSGREQELEQARREAQRQVEALERAAREKEALAKEHAGLAVQLVAAEREGRTLSEEATRLRLEKEALEGSLFEVQRQLAQLEARREQLEAEGQALLLAKETLTGELAGLRQQIIATQEKASLDKELMAQKLVQAEREAQASLREQRAAHEEDLQRLQREKEAAWRELEAERAQLQSQLQREQEELLARLEAEKEELSEEIAALQQERDEGLLLAESEKQQALSLKESEKTALSEKLMGTRHSLATISLEMERQKRDAQSRQEQDRSTVNALTSELRDLRAQREEAAAAHAQEVRRLQEQARDLGKQRDSCLREAEELRTQLRLLEDARDGLRRELLEAQRKLRESQEGREVQRQEAGELRRSLGEGAKEREALRRSNEELRSAVKKAESERISLKLANEDKEQKLALLEEARTAVGKEAGELRTGLQEVERSRLEARRELQELRRQMKMLDSENTRLGRELAELQGRLALGERAEKESRRETLGLRQRLLKGEASLEVMRQELQVAQRKLQEQEGEFRTRERRLLGSLEEARGTEKQQLDHARGLELKLEAARAEAAELGLRLSAAEGRAQGLEAELARVEVQRRAAEAQLGGLRSALRRGLGLGRAPSPAPRPVPGSPARDAPAEGSGEGLNSPSTLECSPGSQPPSPGPATSPASPDLDPEAVRGALREFLQELRSAQRERDELRTQTSALNRQLAEMEAERDSATSRARQLQKAVAESEEARRSVDGRLSGVQAELALQEESVRRSERERRATLDQVATLERSLQATESELRASQEKISKMKANETKLEGDKRRLKEVLDASESRTVKLELQRRSLEGELQRSRLGLSDREAQAQALQDRVDSLQRQVADSEVKAGTLQLTVERLNGALAKVEESEGALRDKVRGLTEALAQSSASLNSTRDKNLHLQKALTACEHDRQVLQERLDAARQALSEARKQSSSLGEQVQTLRGEVADLELQRVEAEGQLQQLREVLRQRQEGEAAALNTVQKLQDERRLLQERLGSLQRALAQLEAEKREVERSALRLEKDRVALRRTLDKVEREKLRSHEDTVRLSAEKGRLDRTLTGAELELAEAQRQIQQLEAQVVVLEQSHSPAQLEVDAQQQQLELQQEVERLRSAQAQTERTLEARERAHRQRVRGLEEQVSTLKGQLQQELRRSSAPFSPPSGPPEK

SEQ ID NO: 40 - protein, 154 aa, Homo sapiens [sequence omitted]

SEQ ID NO: 41 - protein, 114 aa, Homo sapiens
MASVSELACIYSALILHDDEVTVTEDKINALIKAAGVNVEPFWPGLFAKALANVNIGSLICNVGAGGPAPAAGAAPAGGPAPSTAAAPAEEKKVEAKKEESEESDDDMGFGLFD

SEQ ID NO: 42 - protein, 946 aa, Homo sapiens
MKRLTCFFICFFLSEVSGFEIPINGLSEFVDYEDLVELAPGKFQLVAENRRYQRSLPGESEEMMEEVDQVTLYSYKVQSTITSRMATTMIQSKVVNNSPQPQNVVFDVQIPKGAFISNFSMTVDGKTFRSSIKEKTVGRALYAQARAKGKTAGLVRSSALDMENFRTEVNVLPGAKVQFELHYQEVKWRKLGSYEHRIYLQPGRLAKHLEVDVWVIEPQGLRFLHVPDTFEGHFDGVPVISKGQQKAHVSFKPTVAQQRICPNCRETAVDGELVVLYDVKREEKAGELEVFNGYFVHFFAPDNLDPIPKNILFVIDVSGSMWGVKMKQTVEAMKTILDDLRAEDHFSVIDFNQNIRTWRNDLISATKTQVADAKRYIEKIQPSGGTNINEALLRAIFILNEANNLGLLDPNSVSLIILVSDGDPTVGELKLSKIQKNVKENIQDNISLFSLGMGFDVDYDFLKRLSNENHGIAQRIYGNQDTSSQLKKFYNQVSTPLLRNVQFNYPHTSVTDVTQNNFHNYFGGSEIVVAGKFDPAKLDQIESVITATSANTQLVLETLAQMDDLQDFLSKDKHADPDFTRKLWAYLTINQLLAERSLAPTAAAKRRITRSILQMSLDHHIVTPLTSLVIENEAGDERMLADAPPQDPSCCSGALYYGSKVVPDSTPSWANPSPTPVISMLAQGSQVLESTPPPHVMRVENDPHFIIYLPKSQKNICFNIDSEPGKILNLVSDPESGIVVNGQLVGAKKPNNGKLSTYFGKLGFYFQSEDIKIEISTETITLSHGSSTFSLSWSDTAQVTNQRVQISVKKEKVVTITLDKEMSFSVLLHRVWKKHPVNVDFLGIYIPPTNKFSPKAHGLIGQFMQEPKIHIFNERPGKDPEKPEASMEVKGQKLIITRGLQKDYRTDLVFGTDVTCWFVHNSGKGFIDGHYKDYFVPQLYSFLKRP

SEQ ID NO: 43 - protein, 90 aa, Homo sapiens
MKFLAVLVLLGVSIFLVSAQNPTTAAPADTYPATGPADDEAPDAETTAAATTATTAAPTTATTAASTTARKDIPVLPKWVGDLPNGRVCP

SEQ ID NO: 44 - protein, 90 aa, Homo sapiens
MACPLDQAIGLLVAIFHKYSGREGDKHTLSKKELKELIQKELTIGSKLQDAEIARLMEDLDRNKDQEVNFQEYVTFLGALALIYNEALKG

SEQ ID NO: 45 - protein, 358 aa, Homo sapiens
MSADAAAGAPLPRLCCLEKGPNGYGFHLHGEKGKLGQYIRLVEPGSPAEKAGLLAGDRLVEVNGENVEKETHQQVVSRIRAALNAVRLLVVDPETDEQLQKLGVQVREELLRAQEAPGQAEPPAAAEVQGAGNENEPREADKSHPEQRELRPRLCTMKKGPSGYGFNLHSDKSKPGQFIRSVDPDSPAEASGLRAQDRIVEVNGVCMEGKQHGDVVSAIRAGGDETKLLVVDRETDEFFKKCRVIPSQEHLNGPLPVPFTNGEIQKENSREALAEAALESPRPALVRSASSDTSEELNSQDSPPKQDSTAPSSTSSSDPILDFNISLAMAKERAHQKRSSKRAPQMDWSKKNELFSNL

SEQ ID NO: 46 - protein, 75 aa, Homo sapiens
MARYEEVSVSGFEEFHRAVEQHNGKTIFAYFTGSKDAGGKSWCPDCVQAEPVVREGLKHISEGCVFIYCQVGEKP

SEQ ID NO: 47 - protein, 406 aa, Homo sapiens
MSALGAVIALLLWGQLFAVDSGNDVTDIADDGCPKPPEIAHGYVEHSVRYQCKNYYKLRTEGDGVYTLNDKKQWINKAVGDKLPECEADDGCPKPPEIAHGYVEHSVRYQCKNYYKLRTEGDGVYTLNNEKQWINKAVGDKLPECEAVCGKPKNPANPVQRILGGHLDAKGSFPWQAKMVSHHNLTTGATLINEQWLLTTAKNLFLNHSENATAKDIAPTLTLYVGKKQLVEIEKVVLHPNYSQVDIGLIKLKQKVSVNERVMPICLPSKDYAEVGRVGYVSGWGRNANFKFTDHLKYVMLPVADQDQCIRHYEGSTVPEKKTPKSPVGVQPILNEHTFCAGMSKYQEDTCYGDAGSAFAVHDLEEDTWYATGILSFDKSCAVAEYGVYVKVTSIQDWVQKTIAEN

SEQ ID NO: 48 - protein, 171 aa, Homo sapiens
MSSKRTKTKTKKRPQRATSNVFAMFDQSQIQEFKEAFNMIDQNRDGFIDKEDLHDMLASLGKNPTDEYLDAMMNEAPGPINFTMFLTMFGEKLNGTDPEDVIRNAFACFDEEATGTIQEDYLRELLTTMGDRFTDEEVDELYREAPIDKKGNFNYIEFTRILKHGAKDKDD

SEQ ID NO: 49 - protein, 461 aa, Homo sapiens [sequence omitted]

SEQ ID NO: 50 - protein, 434 aa, Homo sapiens
MSILKIHAREIFDSRGNPTVEVDLFTSKGLFRAAVPSGASTGIYEALELRDNDKTRYMGKGVSKAVEHINKTIAPALVSKKLNVTEQEKIDKLMIEMDGTENKSKFGANAILGVSLAVCKAGAVEKGVPLYRHIADLAGNSEVILPVPAFNVINGGSHAGNKLAMQEFMILPVGAANFREAMRIGAEVYHNLKNVIKEKYGKDATNVGDEGGFAPNILENKEGLELLKTAIGKAGYTDKVVIGMDVAASEFFRSGKYDLDFKSPDDPSRYISPDQLADLYKSFIKDYPVVSIEDPFDQDDWGAWQKFTASAGIQVVGDDLTVTNPKRIAKAVNEKSCNCLLLKVNQIGSVTESLQACKLAQANGWGVMVSHRSGETEDTFIADLVVGLCTGQIKTGAPCRSERLAKYNQLLRIEEELGSKAKFAGRNFRNPLAK

SEQ ID NO: 51 - protein, 117 aa, Homo sapiens
MDMRVPAQLLGLLLLWLPGARCAIQMTQSPSSLSASVGDRVTITCRASQGIRNDLGWYQQKPGKAPKLLIYAASSLQSGVPSRFSGSGSGTDFTLTISSLQPEDFATYYCLQDYNYP

SEQ ID NO: 52 - protein, 352 aa, Homo sapiens
MRSLGALLLLLSACLAVSAGPVPTPPDNIQVQENFNISRIYGKWYNLAIGSTCPWLKKIMDRMTVSTLVLGEGATEAEISMTSTRWRKGVCEETSGAYEKTDTDGKFLYHKSKWNITMESYVVHTNYDEYAIFLTKKFSRHHGPTITAKLYGRAPQLRETLLQDFRVVAQGVGIPEDSIFTMADRGECVPGEQEPEPILIPRVRRAVLPQEEEGSGGGQLVTEVTKKEDSCQLGYSAGPCMGMTSRYFYNGTSMACETFQYGGCMGNGNNFVTEKECLQTCRTVAACNLPIVRGPCRAFIQLWAFDAVKGKCVLFPYGGCQGNGNKFYSEKECREYCGVPGDGDEELLRFSN

SEQ ID NO: 53 - protein, 485 aa, Homo sapiens
MRKRAPQSEMAPAGVSLRATILCLLAWAGLAAGDRVYIHPFHLVIHNESTCEQLAKANAGKPKDPTFIPAPIQAKTSPVDEKALQDQLVLVAAKLDTEDKLRAAMVGMLANFLGFRIYGMHSELWGVVHGATVLSPTAVFGTLASLYLGALDHTADRLQAILGVPWKDKNCTSRLDAHKVLSALQAVQGLLVAQGRADSQAQLLLSTVVGVFTAPGLHLKQPFVQGLALYTPVVLPRSLDFTELDVAAEKIDRFMQAVTGWKTGCSLMGASVDSTLAFNTYVHFQGKMKGFSLLAEPQEFWVDNSTSVSVPMLSGMGTFQHWSDIQDNFSVTQVPFTESACLLLIQPHYASDLDKVEGLTFQQNSLNWMKKLSPRTIHLTMPQLVLQGSYDLQDLLAQAELPAILHTELNLQKLSNDRIRVGEVLNSIFFELEADEREPTESTQQLNKPEVLEVTLNRPFLFAVYDQSATALHFLGRVANPLSTA

SEQ ID NO: 54 - protein, 464 aa, Homo sapiens
MYSNVIGTVTSGKRKVYLLSLLLIGFWDCVTCHGSPVDICTAKPRDIPMNPMCIYRSPEKKATEDEGSEQKIPEATNRRVWELSKANSRFATTFYQHLADSKNDNDNIFLSPLSISTAFAMTKLGACNDTLQQLMEVFKFDTISEKTSDQIHFFFAKLNCRLYRKANKSSKLVSANRLFGDKSLTFNETYQDISELVYGAKLQPLDFKENAEQSRAAINKWVSNKTEGRITDVIPSEAINELTVLVLVNTIYFKGLWKSKFSPENTRKELFYKADGESCSASMMYQEGKFRYRRVAEGTQVLELPFKGDDITMVLILPKPEKSLAKVEKELTPEVLQEWLDELEEMMLVVHMPRFRIEDGFSLKEQLQDMGLVDLFSPEKSKLPGIVAEGRDDLYVSDAFHKAFLEVNEEGSEAAASTAVVIAGRSLNPNRVTFKANRPFLVFIREVPLNTIIFMGRVANPCVK

SEQ ID NO: 55 - protein, 100 aa, Homo sapiens
MKLLAATVLLLTICSLEGALVRRQAKEPCVESLVSQYFQTVTDYGKDLMEKVKSPELQAEAKSYFEKSKEQLTPLIKKAGTELVNFLSYFVELGTQPATQ

SEQ ID NO: 56 - protein, 708 aa, Homo sapiens
MNPTETKAIPVSQQMEGPHLPNKKKHKKQAVKTEPEKKSQSTKLSVVHEKKSQEGKPKEHTEPKSLPKQASDTGSNDAHNKKAVSRSAEQQPSEKSTEPKTKPQDMISAGGESVAGITAISGKPGDKKKEKKSLTPAVPVESKPDKPSGKSGMDAALDDLIDTLGGPEETEEENTTYTGPEVSDPMSSTYIEELGKREVTIPPKYRELLAKKEGITGPPADSSKPIGPDDAIDALSSDFTCGSPTAAGKKTEKEESTEVLKAQSAGTVRSAAPPQEKKRKVEKDTMSDQALEALSASLGTRQAEPELDLRSIKEVDEAKAKEEKLEKCGEDDETIPSEYRLKPATDKDGKPLLPEPEEKPKPRSESELIDELSEDFDRSECKEKPSKPTEKTEESKAAAPAPVSEAVCRTSMCSIQSAPPEPATLKGTVPDDAVEALADSLGKKEADPEDGKPVMDKVKEKAKEEDREKLGEKEETIPPDYRLEEVKDKDGKPLLPKESKEQLPPMSEDFLLDALSEDFSGPQNASSLKFEDAKLAAAISEVVSQTPASTTQAGAPPRDTSQSDKDLDDALDKLSDSLGQRQPDPDENKPMEDKVKEKAKAEHRDKLGERDDTIPPEYRHLLDDNGQDKPVKPPTKKSEDSKKPADDQDPIDALSGDLDSCPSTTETSQNTAKDKCKKAASSSKAPKNGGKAKDSAKTTEETSKPKDD

SEQ ID NO: 57 - protein, 227 aa, Homo sapiens
MGGKLSKKKKGYNVNDEKAKEKDKKAEGAATEEEGTPKESEPQAAAEPAEAKEGKEKPDQDAEGKAEEKEGEKDAAAAKEEAPKAEPEKTEGAAEAKAEPPKAPEQEQAAPGPAAGGEAPKAAEAAAAPAESAAPAAGEEPSKEEGEPKKTEAPAAPAAQETKSDGAPASDSKPGSSEAAPSSKETPAATEAPSSTPKAQGPAASAEEPKPVEAPAANSDQTVTVKE

SEQ ID NO: 58 - protein, 367 aa, Homo sapiens
MKSLVLLLCLAQLWGCHSAPHGPGLIYRQPNCDDPETEEAALVAIDYINQNLPWGYKHTLNQIDEVKVWPQQPSGELFEIEIDTLETTCHVLDPTPVARCSVRQLKEHAVEGDCDFQLLKLDGKFSVVYAKCDSSPDSAEDVRKVCQDCPLLAPLNDTRVVHAAKAALAAFNAQNNGSNFQLEEISRAQLVPLPPSTYVEFTVSGTDCVAKEATEAAKCNLLAEKQYGFCKATLSEKLGGAEVAVTCMVFQTQPVSSQPQPEGANEAVPTPVVDPDAPPSPPLGAPGLPPAGSPPDSHVLLAAPPGHQLHRAHYDLRHTFMGVVSLGSPSGEVSHPRKTRTVVQPSVGAAAGPVVPPCPGRIRHFKV

SEQ ID NO: 59 - protein, 417 aa, Homo sapiens
MLLSVPLLLGLLGLAVAEPAVYFKEQFLDGDGWTSRWIESKHKSDFGKFVLSSGKFYGDEEKDKGLQTSQDARFYALSASFEPFSNKGQTLVVQFTVKHEQNIDCGGGYVKLFPNSLDQTDMHGDSEYNIMFGPDICGPGTKKVHVIFNYKGKNVLINKDIRCKDDEFTHLYTLIVRPDNTYEVKIDNSQVESGSLEDDWDFLPPKKIKDPDASKPEDWDERAKIDDPTDSKPEDWDKPEHIPDPDAKKPEDWDEEMDGEWEPPVIQNPEYKGEWKPRQIDNPDYKGTWIHPEIDNPEYSPDPSIYAYDNFGVLGLDLWQVKSGTIFDNFLITNDEAYAEEFGNETWGVTKAAEKQMKDKQDEEQRLKEEEEDKKRKEEEEAEDKEDDEDKDEDEEDEEDKEEDEEEDVPGQAKDEL

SEQ ID NO: 60 - protein, 714 aa, Homo sapiens
MSEEIITPVYCTGVSAQVQKQRARELGLGRHENAIKYLGQDYEQLRVRCLQSGTLFRDEAFPPVPQSLGYKDLGPNSSKTYGIKWKRPTELLSNPQFIVDGATRTDICQGALGDCWLLAAIASLTLNDTLLHRVVPHGQSFQNGYAGIFHFQLWQFGEWVDVVVDDLLPIKDGKLVFVHSAEGNEFWSALLEKAYAKVNGSYEALSGGSTSEGFEDFTGGVTEWYELRKAPSDLYQIILKALERGSLLGCSIDISSVLDMEAITFKKLVKGHAYSVTGAKQVNYRGQVVSLIRMRNPWGEVEWTGAWSDSSSEWNNVDPYERDQLRVKMEDGEFWMSFRDFMREFTRLEICNLTPDALKSRTIRKWNTTLYEGTWRRGSTAGGCRNYPATFWVNPQFKIRLDETDDPDDYGDRESGCSFVLALMQKHRRRERRFGRDMETIGFAVYEVPPELVGQPAVHLKRDFFLANASRARSEQFINLREVSTRFRLPPGEYVVVPSTFEPNKEGDFVLRFFSEKSAGTVELDDQIQANLPDEQVLSEEEIDENFKALFRQLAGEDMEISVKELRTILNRIISKHKDLRTKGFSLESCRSMVNLMDRDGNGKLGLVEFNILWNRIRNYLSIFRKFDLDKSGSMSAYEMRMAIESAGFKLNKKLYELIITRYSEPDLAVDFDNFVCCLVRLETMFRFFKTLDTDLDGVVTFDLFKWLQLTMFA

SEQ ID NO: 61 - protein, 191 aa, Homo sapiens
MQTIKCVVVGDGAVGKTCLLISYTTNKFPSEYVPTVFDNYAVTVMIGGEPYTLGLFDTAGQEDYDRLRPLSYPQTDVFLVCFSVVSPSSFENVKEKWVPEITHHCPKTPFLLVGTQIDLRDDPSTIEKLAKNKQKPITPETAEKLARDLKAVKYVECSALTQKGLKNVFDEAILAALEPPEPKKSRRCVLL

SEQ ID NO: 62 - protein, 1663 aa, Homo sapiens
MGPTSGPSLLLLLLTHLPLALGSPMYSIITPNILRLESEETMVLEAHDAQGDVPVTVTVHDFPGKKLVLSSEKTVLTPATNHMGNVTFTIPANREFKSEKGRNKFVTVQATFGTQVVEKVVLVSLQSGYLFIQTDKTIYTPGSTVLYRIFTVNHKLLPVGRTVMVNIENPEGIPVKQDSLSSQNQLGVLPLSWDIPELVNMGQWKIRAYYENSPQQVFSTEFEVKEYVLPSFEVIVEPTEKFYYIYNEKGLEVTITARFLYGKKVEGTAFVIFGIQDGEQRISLPESLKRIPIEDGSGEVVLSRKVLLDGVQNPRAEDLVGKSLYVSATVILHSGSDMVQAERSGIPIVTSPYQIHFTKTPKYFKPGMPFDLMVFVTNPDGSPAYRVPVAVQGEDTVQSLTQGDGVAKLSINTHPSQKPLSITVRTKKQELSEAEQATRTMQALPYSTVGNSNNYLHLSVLRTELRPGETLNVNFLLRMDRAHEAKIRYYTYLIMNKGRLLKAGRQVREPGQDLVVLPLSITTDFIPSFRLVAYYTLIGASGQREVVADSVWVDVKDSCVGSLVVKSGQSEDRQPVPGQQMTLKIEGDHGARVVLVAVDKGVFVLNKKNKLTQSKIWDVVEKADIGCTPGSGKDYAGVFSDAGLTFTSSSGQQTAQRAELQCPQPAARRRRSVQLTEKRMDKVGKYPKELRKCCEDGMRENPMRFSCQRRTRFISLGEACKKVFLDCCNYITELRRQHARASHLGLARSNLDEDIIAEENIVSRSEFPESWLWNVEDLKEPPKNGISTKLMNIFLKDSITTWEILAVSMSDKKGICVADPFEVTVMQDFFIDLRLPYSVVRNEQVEIRAVLYNYRQNQELKVRVELLHNPAFCSLATTKRRHQQTVTIPPKSSLSVPYVIVPLKTGLQEVEVKAAVYHHFISDGVRKSLKVVPEGIRMNKTVAVRTLDPERLGREGVQKEDIPPADLSDQVPDTESETRILLQGTPVAQMTEDAVDAERLKHLIVTPSGCGEQNMIGMTPTVIAVHYLDETEQWEKFGLEKRQGALELIKKGYTQQLAFRQPSSAFAAFVKRAPSTWLTAYVVKVFSLAVNLIAIDSQVLCGAVKWLILEKQKPDGVFQEDAPVIHQEMIGGLRNNNEKDMALTAFVLISLQEAKDICEEQVNSLPGSITKAGDFLEANYMNLQRSYTVAIAGYALAQMGRLKGPLLNKFLTTAKDKNRWEDPGKQLYNVEATSYALLALLQLKDFDFVPPVVRWLNEQRYYGGGYGSTQATFMVFQALAQYQKDAPDHQELNLDVSLQLPSRSSKITHRIHWESASLLRSEETKENEGFTVTAEGKGQGTLSVVTMYHAKAKDQLTCNKFDLKVTIKPAPETEKRPQDAKNTMILEICTRYRGDQDATMSILDISMMTGFAPDTDDLKQLANGVDRYISKYELDKAFSDRNTLIIYLDKVSHSEDDCLAFKVHQYFNVELIQPGAVKVYAYYNLEESCTRFYHPEKEDGKLNKLCRDELCRCAEENCFIQKSDDKVTLEERLDKACEPGVDYVYKTRLVKVQLSNDFDEYIMAIEQTIKSGSDEVQVGQQRTFISPIKCREALKLEEKKHYLMWGLSSDFWGEKPNLSYIIGKDTWVEHWPEEDECQDEENQKQCQDLGAFTESMVVFGCPN

SEQ ID NO: 63 - protein, 461 aa, Homo sapiens
MSRQVVRSSKFRHVFGQPAKADQCYEDVRVSQTTWDSGFCAVNPKFVALICEASGGGAFLVLPLGKTGRVDKNAPTVCGHTAPVLDIAWCPHNDNVIASGSEDCTVMVWEIPDGGLMLPLREPVVTLEGHTKRVGIVAWHTTAQNVLLSAGCDNVIMVWDVGTGAAMLTLGPEVHPDTIYSVDWSRDGGLICTSCRDKRVRIIEPRKGTVVAEKDRPHEGTRPVRAVFVSEGKILTTGFSRMSERQVALWDTKHLEEPLSLQELDTSSGVLLPFFDPDTNIVYLCGKGDSSIRYFEITSEAPFLHYLSMFSSKESQRGMGYMPKRGLEVNKCEIARFYKLHERRCEPIAMTVPRKSDLFQEDLYPPTAGPDPALTAEEWLGGRDAGPLLISLKDGYVPPKSRELRVNRGLDTGRRRAAPEASGTPSSDAVSRLEEEMRKLQATVQELQKRLDRLEETVQAK

SEQ ID NO: 64 - protein, 94 aa, Homo sapiens
MRTLAILAAILLVALQAQAEPLQARADEVAAAPEQIAADIPEVVVSLAWDESLAPKHPGSRKNMACYCRIPACIAGERRYGTCIYQGRLWAFCC

SEQ ID NO: 65 - protein, 275 aa, Homo sapiens
MEEVREGHALGGGMEADGPASLQELPPSPRSPSPPPSPPPLPSPPSLPSPAAPEAPELPEPAQPSEAHARQLLLEEWGPLSGGLELPQRLTWKLLLLRRPLYRNLLRSPNPEGINIYEPAPPTGPTQRPLETLGNFRGWYIRTEKLQQNQSWTVKQQCVDLLAEGLWEELLDDEQPAITVMDWFEDSRLDACVYELHVWLLAADRRTVIAQHHVAPRTSGRGPPGRWVQVSHVFRHYGPGVRFIHFLHKAKNRMEPGGLRRTRVTDSSVSVQLRE

SEQ ID NO: 66 - protein, 188 aa, Homo sapiens
MANSGCKDVTGPDEESFLYFAYGSNLLTERIHLRNPSAAFFCVARLQDFKLDFGNSQGKTSQTWHGGIATIFQSPGDEVWGVVWKMNKSNLNSLDEQEGVKSGMYVVIEVKVATQEGKEITCRSYLMTNYESAPPSPQYKKIICMGAKENGLPLEYQEKLKAIEPNDYTGKVSEEIEDIIKKGETQTL

SEQ ID NO: 67 - protein, 522 aa, Homo sapiens
MALLPRALSAGAGPSWRRAARAFRGFLLLLPEPAALTRALSRAMACRQEPQPQGPPPAAGAVASYDYLVIGGGSGGLASARRAAELGARAAVVESHKLGGTCVNVGCVPKKVMWNTAVHSEFMHDHADYGFPSCEGKFNWRVIKEKRDAYVSRLNAIYQNNLTKSHIEIIRGHAAFTSDPKPTIEVSGKKYTAPHILIATGGMPSTPHESQIPGASLGITSDGFFQLEELPGRSVIVGAGYIAVEMAGILSALGSKTSLMIRHDKVLRSFDSMISTNCTEELENAGVEVLKFSQVKEVKKTLSGLEVSMVTAVPGRLPVMTMIPDVDCLLWAIGRVPNTKDLSLNKLGIQTDDKGHIIVDEFQNTNVKGIYAVGDVCGKALLTPVAIAAGRKLAHRLFEYKEDSKLDYNNIPTVVFSHPPIGTVGLTEDEAIHKYGIENVKTYSTSFTPMYHAVTKRKTKCVMKMVCANKEEKVVGIHMQGLGCDEMLQGFAVAVKMGATKADFDNTVAIHPTSSEELVTLR

SEQ ID NO: 68 - protein, 644 aa, Homo sapiens
MSRQFSSRSGYRSGGGFSSGSAGIINYQRRTTSSSTRRSGGGGGRFSSCGGGGGSFGAGGGFGSRSLVNLGGSKSISISVARGGGRGSGFGGGYGGGGFGGGGFGGGGFGGGGIGGGGFGGFGSGGGGFGGGGFGGGGYGGGYGPVCPPGGIQEVTINQSLLQPLNVEIDPEIQKVKSREREQIKSLNNQFASFIDKVRFLEQQNQVLQTKWELLQQVDTSTRTHNLEPYFESFINNLRRRVDQLKSDQSRLDSELKNMQDMVEDYRNKYEDEINKRTNAENEFVTIKKDVDGAYMTKVDLQAKLDNLQQEIDFLTALYQAELSQMQTQISETNVILSMDNNRSLDLDSIIAEVKAQYEDIAQKSKAEAESLYQSKYEELQITAGRHGDSVRNSKIEISELNRVIQRLRSEIDNVKKQISNLQQSISDAEQRGENALKDAKNKLNDLEDALQQAKEDLARLLRDYQELMNTKLALDLEIATYRTLLEGEESRMSGECAPNVSVSVSTSHTTISGGGSRGGGGGGYGSGGSSYGSGGGSYGSGGGGGGGRGSYGSGGSSYGSGGGSYGSGGGGGGHGSYGSGSSSGGYRGGSGGGGGGSSGGRGSGGGSSGGSIGGRGSSSGGVKSSGGSSSVKFVSTTYSGVTR

SEQ ID NO: 69 - protein, 630 aa, Homo sapiens
MALPTARPLLGSCGTPALGSLLFLLFSLGWVQPSRTLAGETGQEAAPLDGVLANPPNISSLSPRQLLGFPCAEVSGLSTERVRELAVALAQKNVKLSTEQLRCLAHRLSEPPEDLDALPLDLLLFLNPDAFSGPQACTRFFSRITKANVDLLPRGAPERQRLLPAALACWGVRGSLLSEADVRALGGLACDLPGRFVAESAEVLLPRLVSCPGPLDQDQQEAARAALQGGGPPYGPPSTWSVSTMDALRGLLPVLGQPIIRSIPQGIVAAWRQRSSRDPSWRQPERTILRPRFRREVEKTACPSGKKAREIDESLIFYKKWELEACVDAALLATQMDRVNAIPFTYEQLDVLKHKLDELYPQGYPESVIQHLGYLFLKMSPEDIRKWNVTSLETLKALLEVNKGHEMSPQAPRRPLPQVATLIDRFVKGRGQLDKDTLDTLTAFYPGYLCSLSPEELSSVPPSSIWAVRPQDLDTCDPRQLDVLYPKARLAFQNMNGSEYFVKIQSFLGGAPTEDLKALSQQNVSMDLATFMKLRTDAVLPLTVAEVQKLLGPHVEGLKAEERHRPVRDWILRQRQDDLDTLGLGLQGGIPNGYLVLDLSMQEALSGTPCLLGPGPVLTVLALLLASTLA

SEQ ID NO: 70 - protein, 118 aa, Homo sapiens
MCDKEFMWALKNGDLDEVKDYVAKGEDVNRTLEGGRKPLHYAADCGQLEILEFLLLKGADINAPDKHHITPLLSAVYEGHVSCVKLLLSKGADKTVKGPDGLTAFEATDNQAIKALLQ

SEQ ID NO: 71 - protein, 538 aa, Homo sapiens
MAAEQDPEARAAARPLLTDLYQATMALGYWRAGRARDAAEFELFFRRCPFGGAFALAAGLRDCVRFLRAFRLRDADVQFLASVLPPDTDPAFFEHLRALDCSEVTVRALPEGSLAFPGVPLLQVSGPLLVVQLLETPLLCLVSYASLVATNAARLRLIAGPEKRLLEMGLRRAQGPDGGLTASTYSYLGGFDSSSNVLAGQLRGVPVAGTLAHSFVTSFSGSEVPPDPMLAPAAGEGPGVDLAAKAQVWLEQVCAHLGLGVQEPHPGERAAFVAYALAFPRAFQGLLDTYSVWRSGLPNFLAVALALGELGYRAVGVRLDSGDLLQQAQEIRKVFRAAAAQFQVPWLESVLIVVSNNIDEEALARLAQEGSEVNVIGIGTSVVTCPQQPSLGGVYKLVAVGGQPRMKLTEDPEKQTLPGSKAAFRLLGSDGSPLMDMLQLAEEPVPQAGQELRVWPPGAQEPCTVRPAQVEPLLRLCLQQGQLCEPLPSLAESRALAQLSLSRLSPEHRRLRSPAQYQVVLSERLQALVNSLCAGQSP

SEQ ID NO: 72 - protein, 911 aa, Homo sapiens
MDGAMGPRGLLLCMYLVSLLILQAMPALGSATGRSKSSEKRQAVDTAVDGVFIRSLKVNCKVTSRFAHYVVTSQVVNTANEAREVAFDLEIPKTAFISDFAVTADGNAFIGDIKDKVTAWKQYRKAAISGENAGLVRASGRTMEQFTIHLTVNPQSKVTFQLTYEEVLKRNHMQYEIVIKVKPKQLVHHFEIDVDIFEPQGISKLDAQASFLPKELAAQTIKKSFSGKKGHVLFRPTVSQQQSCPTCSTSLLNGHFKVTYDVSRDKICDLLVANNHFAHFFAPQNLTNMNKNVVFVIDISGSMRGQKVKQTKEALLKILGDMQPGDYFDLVLFGTRVQSWKGSLVQASEANLQAAQDFVRGFSLDEATNLNGGLLRGIEILNQVQESLPELSNHASILIMLTDGDPTEGVTDRSQILKNVRNAIRGRFPLYNLGFGHNVDFNFLEVMSMENNGRAQRIYEDHDATQQLQGFYSQVAKPLLVDVDLQYPQDAVLALTQNHHKQYYEGSEIVVAGRIADNKQSSFKADVQAHGEGQEFSITCLVDEEEMKKLLRERGHMLENHVERLWAYLTIQELLAKRMKVDREERANLSSQALQMSLDYGFVTPLTSMSIRGMADQDGLKPTIDKPSEDSPPLEMLGPRRTFVLSALQPSPTHSSSNTQRLPDRVTGVDTDPHFIIHVPQKEDTLCFNINEEPGVILSLVQDPNTGFSVNGQLIGNKARSPGQHDGTYFGRLGIANPATDFQLEVTPQNITLNPGFGGPVFSWRDQAVLRQDGVVVTINKKRNLVVSVDDGGTFEVVLHRVWKGSSVHQDFLGFYVLDSHRMSARTHGLLGQFFHPIGFEVSDIHPGSDPTKPDATMVVRNRRLTVTRGLQKDYSKDPWHGAEVSCWFIHNNGAGLIDGAYTDYIVPDIF

SEQ ID NO: 73 - protein, 256 aa, Homo sapiens
MRPAALRGALLGCLCLALLCLGGADKRLRDNHEWKKLIMVQHWPETVCEKIQNDCRDPPDYWTIHGLWPDKSEGCNRSWPFNLEEIKDLLPEMRAYWPDVIHSFPNRSRFWKHEWEKHGTCAAQVDALNSQKKYFGRSLELYRELDLNSVLLKLGIKPSINYYQVADFKDALARVYGVIPKIQCLPPSQDEEVQTIGQIELCLTKQDQQLQNCTEPGEQPSPKQEVWLANGAAESRGLRVCEDGPVFYPPPKKTKH

SEQ ID NO: 74 - protein, 222 aa, Homo sapiens
MLSRAVCGTSRQLAPVLGYLGSRQKHSLPDLPYDYGALEPHINAQIMQLHHSKHHAAYVNNLNVTEEKYQEALAKGDVTAQIALQPALKFNGGGHINHSIFWTNLSPNGGGEPKGELLEAIKRDFGSFDKFKEKLTAASVGVQGSGWGWLGFNKERGHLQIAACPNQDPLQGTTGLIPLLGIDVWEHAYYLQYKNVRPDYLKAIWNVINWENVTERYMACKK

SEQ ID NO: 75 - protein, 169 aa, Homo sapiens
MSSYQQKQTFTPPPQLQQQQVKQPSQPPPQEIFVPTTKEPCHSKVPQPGNTKIPEPGCTKVPEPGCTKVPEPGCTKVPEPGCTKVPEPGCTKVPEPGCTKVPEPGYTKVPEPGSIKVPDQGFIKFPEPGAIKVPEQGYTKVPVPGYTKLPEPCPSTVTPGPAQQKTKQK

SEQ ID NO: 76 - protein, 550 aa, Homo sapiens
MWKASAGHAVSIAQDDAGADDWETDPDFVNDVSEKEQRWGAKTVQGSGHQEHINIHKLRENVFQEHQTLKEKELETGPKASHGYGGKFGVEQDRMDKSAVGHEYQSKLSKHCSQVDSVRGFGGKFGVQMDRVDQSAVGFEYQGKTEKHASQKDYSSGFGGKYGVQADRVDKSAVGFDYQGKTEKHESQRDYSKGFGGKYGIDKDKVDKSAVGFEYQGKTEKHESQKDYVKGFGGKFGVQTDRQDKCALGWDHQEKLQLHESQKDYKTGFGGKFGVQSERQDSAAVGFDYKEKLAKHESQQDYSKGFGGKYGVQKDRMDKNASTFEDVTQVSSAYQKTVPVEAVTSKTSNIRANFENLAKEKEQEDRRKAEAERAQRMAKERQEQEEARRKLEEQARAKTQTPPVSPAPQPTEERLPSSPVYEDAASFKAELSYRGPVSGTEPEPVYSMEAADYREASSQQGLAYATEAVYESAEAPGHYPAEDSTYDEYENDLGITAVALYDYQAAGDDEISFDPDDIITNIEMIDDGWWRGVCKGRYGLFPANYVELRQ

SEQ ID NO: 77 - protein, 445 aa, Homo sapiens
MREIVHLQAGQCGNQIGAKFWEVISDEHGIDPTGTYHGDSDLQLERINVYYNEATGGKYVPRAVLVDLEPGTMDSVRSGPFGQIFRPDNFVFGQSGAGNNWAKGHYTEGAELVDSVLDVVRKEAESCDCLQGFQLTHSLGGGTGSGMGTLLISKIREEYPDRIMNTFSVVPSPKVSDTVVEPYNATLSVHQLVENTDETYCIDNEALYDICFRTLKLTTPTYGDLNHLVSATMSGVTTCLRFPGQLNADLRKLAVNMVPFPRLHFFMPGFAPLTSRGSQQYRALTVPELTQQMFDAKNMMAACDPRHGRYLTVAAVFRGRMSMKEVDEQMLNVQNKNSSYFVEWIPNNVKTAVCDIPPRGLKMSATFIGNSTAIQELFKRISEQFTAMFRRKAFLHWYTGEGMDEMEFTEAESNMNDLVSEYQQYQDATAEEEGEFEEEAEEEVA

SEQ ID NO: 78 - protein, 698 aa, Homo sapiens
MRLAVGALLVCAVLGLCLAVPDKTVRWCAVSEHEATKCQSFRDHMKSVIPSDGPSVACVKKASYLDCIRAIAANEADAVTLDAGLVYDAYLAPNNLKPVVAEFYGSKEDPQTFYYAVAVVKKDSGFQMNQLRGKKSCHTGLGRSAGWNIPIGLLYCDLPEPRKPLEKAVANFFSGSCAPCADGTDFPQLCQLCPGCGCSTLNQYFGYSGAFKCLKDGAGDVAFVKHSTIFENLANKADRDQYELLCLDNTRKPVDEYKDCHLAQVPSHTVVARSMGGKEDLIWELLNQAQEHFGKDKSKEFQLFSSPHGKDLLFKDSAHGFLKVPPRMDAKMYLGYEYVTAIRNLREGTCPEAPTDECKPVKWCALSHHERLKCDEWSVNSVGKIECVSAETTEDCIAKIMNGEADAMSLDGGFVYIAGKCGLVPVLAENYNKSDNCEDTPEAGYFAIAVVKKSASDLTWDNLKGKKSCHTAVGRTAGWNIPMGLLYNKINHCRFDEFFSEGCAPGSKKDSSLCKLCMGSGLNLCEPNNKEGYYGYTGAFRCLVEKGDVAFVKHQTVPQNTGGKNPDPWAKNLNEKDYELLCLDGTRKPVEEYANCHLARAPNHAVVTRKDKEACVHKILRQQQHLFGSNVTDCSGNFCLFRSETKDLLFRDDTVCLAKLHDRNTYEKYLGEEYVKAVGNLRKCSTSSLLEACTFRRP

SEQ ID NO: 79 - protein, 210 aa, Homo sapiens
MPPYTVVYFPVRGRCAALRMLLADQGQSWKEEVVTVETWQEGSLKASCLYGQLPKFQDGDLTLYQSNTILRHLGRTLGLYGKDQQEAALVDMVNDGVEDLRCKYISLIYTNYEAGKDDYVKALPGQLKPFETLLSQNQGGKTFIVGDQISFADYNLLDLLLIHEVLAPGCLDAFPLLSAYVGRLSARPKLKAFLASPEYVNLPINGNGKQ

SEQ ID NO: 80 - protein, 478 aa, Homo sapiens
MAPLRPLLILALLAWVALADQESCKGRCTEGFNVDKKCQCDELCSYYQSCCTDYTAECKPQVTRGDVFTMPEDEYTVYDDGEEKNNATVHEQVGGPSLTSDLQAQSKGNPEQTPVLKPEEEAPAPEVGASKPEGIDSRPETLHPGRPQPPAEEELCSGKPFDAFTDLKNGSLFAFRGQYCYELDEKAVRPGYPKLIRDVWGIEGPIDAAFTRINCQGKTYLFKGSQYWRFEDGVLDPDYPRNISDGFDGIPDNVDAALALPAHSYSGRERVYFFKGKQYWEYQFQHQPSQEECEGSSLSAVFEHFAMMQRDSWEDIFELLFWGRTSAGTRQPQFISRDWHGVPGQVDAAMAGRIYISGMAPRPSLAKKQRFRHRNRKGYRSQRGHSRGRNQNSRRPSRATWLSLFSSEESNLGANNYDDYRMDWLVPATCEPIQSVFFFSGDKYYRVNLRTRRVDTVDPPYPRSIAQYWLGCPAPGHL

SEQ ID NO: 81 - protein, 245 aa, Homo sapiens
MEKTELIQKAKLAEQAERYDDMATCMKAVTEQGAELSNEERNLLSVAYKNVVGGRRSAWRVISSIEQKTDTSDKKLQLIKDYREKVESELRSICTTVLELLDKYLIANATNPESKVFYLKMKGDYFRYLAEVACGDDRKQTIDNSQGAYQEAFDISKKEMQPTHPIRLGLALNFSVFYYEILNNPELACTLAKTAFDEAIAELDTLNEDSYKDSTLIMQLLRDNLTLWTSDSAGEECDAAEGAEN

SEQ ID NO: 82 - protein, 248 aa, Homo sapiens [sequence omitted]

SEQ ID NO: 83 - protein, 262 aa, Homo sapiens
MTERENNVYKAKLAEQAERYDEMVEAMKKVASMDVELTVEERNLLSVAYKNVIGARRASWRIITSIEQKEENKGAEEKLEMIKTYRGQVEKELRDICSDILNVLEKHLIPCATSGESKVFYYKMKGDYHRYLAEFATGSDRKDAAENSLIAYKAASDIAMNDLPPTHPIRLGLALNFSVFYYEILNSPDRACRLAKAAFDDAIAELDTLSEESYKDSTLIMQLLRDNLTLWTSDMQAEEVDPNAGDGEPKEQIQDVEDQDVS

SEQ ID NO: 84 - protein, 204 aa, Homo sapiens [sequence omitted]

SEQ ID NO: 85 - protein, 295 aa, Homo sapiens [sequence omitted]

SEQ ID NO: 86 - protein, 69 aa, Homo sapiens [sequence omitted]

SEQ ID NO: 87 - protein, 494 aa, Homo sapiens
MSTGTFVVSQPLNYRGGARVEPADASGTEKAFEPATGRVIATFTCSGEKEVNLAVQNAKAAFKIWSQKSGMERCRILLEAARIIREREDEIATMECINNGKSIFEARLDIDISWQCLEYYAGLAASMAGEHIQLPGGSFGYTRREPLGVCVGIGAWNYPFQIASWKSAPALACGNAMVFKPSPFTPVSALLLAEIYSEAGVPPGLFNVVQGGAATGQFLCQHPDVAKVSFTGSVPTGMKIMEMSAKGIKPVTLELGGKSPLIIFSDCDMNNAVKGALMANFLTQGQVCCNGTRVFVQKEILDKFTEEVVKQTQRIKIGDPLLEDTRMGPLINRPHLERVLGFVKVAKEQGAKVLCGGDIYVPEDPKLKDGYYMRPCVLTNCRDDMTCVKEEIFGPVMSILSFDTEAEVLERANDTTFGLAAGVFTRDIQRAHRVVAELQAGTCFINNYNVSPVELPFGGYKKSGFGRENGRVTIEYYSQLKTVCVEMGDVESAF

SEQ ID NO: 88 - protein, 791 aa, Homo sapiens
MWNMLIVAMCLALLGCLQAQELQGHVSIILLGATGDLAKKYLWQGLFQLYLDEAGRGHSFSFHGAALTAPKQGQELMAKALESLSCPKDMAPSHCAEHKDQFLQLSQYRQLKTAEDYQALNKDIEAQLQHAGLREAGRIFYFSVPPFAYEDIARNINSSCRPGPGAWLRVVLEKPFGHDHFSAQQLATELGTFFQEEEMYRVDHYLGKQAVAQILPFRDQNRKALDGLWNRHHVERVEIIMKETVDAEGRTSFYEEYGVIRDVLQNHLTEVLTLVAMELPHNVSSAEAVLRHKLQVFQALRGLQRGSAVVGQYQSYSEQVRRELQKPDSFHSLTPTFAAVLVHIDNLRWEGVPFILMSGKALDERVGYARILFKNQACCVQSEKHWAAAQSQCLPRQLVFHIGHGDLGSPAVLVSRNLFRPSLPSSWKEMEGPPGLRLFGSPLSDYYAYSPVRERDAHSVLLSHIFHGRKNFFITTENLLASWNFWTPLLESLAHKAPRLYPGGAENGRLLDFEFSSGRLFFSQQQPEQLVPGPGPAPMPSDFQVLRAKYRESPLVSAWSEELISKLANDIEATAVRAVRRFGQFHLALSGGSSPVALFQQLATAHYGFPWAHTHLWLVDERCVPLSDPESNFQGLQAHLLQHVRIPYYNIHPMPVHLQQRLCAEEDQGAQIYAREISALVANSSFDLVLLGMGADGHTASLFPQSPTGLDGEQLVVLTTSPSQPHRRMSLSLPLINRAKKVAVLVMGRMKREITTLVSRVGHEPKKWPISGVLPHSGQLVWYMDYDAFLG

SEQ ID NO: 89 - protein, 654 aa, Homo sapiens
MKLSLVAAMLLLLSAARAEEEDKKEDVGTVVGIDLGTTYSCVGVFKNGRVEIIANDQGNRITPSYVAFTPEGERLIGDAAKNQLTSNPENTVFDAKRLIGRTWNDPSVQQDIKFLPFKVVEKKTKPYIQVDIGGGQTKTFAPEEISAMVLTKMKETAEAYLGKKVTHAVVTVPAYFNDAQRQATKDAGTIAGLNVMRIINEPTAAAIAYGLDKREGEKNILVFDLGGGTFDVSLLTIDNGVFEVVATNGDTHLGGEDFDQRVMEHFIKLYKKKTGKDVRKDNRAVQKLRREVEKAKRALSSQHQARIEIESFYEGEDFSETLTRAKFEELNMDLFRSTMKPVQKVLEDSDLKKSDIDEIVLVGGSTRIPKIQQLVKEFFNGKEPSRGINPDEAVAYGAAVQAGVLSGDQDTGDLVLLDVCPLTLGIETVGGVMTKLIPRNTVVPTKKSQIFSTASDNQPTVTIKVYEGERPLTKDNHLLGTFDLTGIPPAPRGVPQIEVTFEIDVNGILRVTAEDKGTGNKNKITITNDQNRLTPEEIERMVNDAEKFAEEDKKLKERIDTRNELESYAYSLKNQIGDKEKLGGKLSSEDKETMEKAVEEKIEWLESHQDADIEDFKAKKKELEEIVQPIISKLYGSAGPPPTGEEDTAEKDEL

SEQ ID NO: 90 - protein, 372 aa, Homo sapiens
MAYHSFLVEPISCHAWNKDRTQIAICPNNHEVHIYEKSGAKWTKVHELKEHNGQVTGIDWAPESNRIVTCGTDRNAYVWTLKGRTWKPTLVILRINRAARCVRWAPNENKFAVGSGSRVISICYFEQENDWWVCKHIKKPIRSTVLSLDWHPNNVLLAAGSCDFKCRIFSAYIKEVEERPAPTPWGSKMPFGELMFESSSSCGWVHGVCFSASGSRVAWVSHDSTVCLADADKKMAVATLASETLPLLALTFITDNSLVAAGHDCFPVLFTYDAAAGMLSFGGRLDVPKQSSQRGLTARERFQNLDKKASSEGGTAAGAGLDSLHKNSVSQISVLSGGKAKCSQFCTTGMDGGMSIWDVKSLESALKDLKIK

SEQ ID NO: 91 - protein, 151 aa, Homo sapiens
MSKNTVSSARFRKVDVDEYDENKFVDEEDGGDGQAGPDEGEVDSCLRQGNMTAALQAALKNPPINTKSQAVKDRAGSIVLKVLISFKANDIEKAVQSLDKNGVDLLMKYIYKGFESPSDNSSAMLLQWHEKALAAGGVGSIVRVLTARKTV

SEQ ID NO: 92 - protein, 418 aa, Homo sapiens
MNPASGLPAVVIDNGTGYTKMGYAGNNDPSFIIPTTIATQSSKGKQTAASQKKGVEDLDFFIGDEAIANSKTYDMTNPVKHGQIENWTHMEQYWEHCVFKYLRCEPEDHYFLLTEPPLNAPENREFTAEIMFETFNVPGLYIAVQAVLALAASWTSKNAEKTLTGTVIDSGDGVTHVIPISEGYVIGSSIKHIPIAGRDISSYVQQIMREREPNIPPAESLEIAKRVKEQYSYVCPDIVKEFGKYDSEPDKWIKTINAQDSVTKKPFSYDVGYERFLGPELFFNPEIASSDYLTPLPKVVDDTIQSCPIDCRRGLYKNIVLSGGSTMFKDFGKRLQRDVKRSVDYRIKRSEELSGGKIKAVPLAVNVISHNMQRYAVWFGGSMLASTPEFYNVCHTKAQYDEIGPSICRFNTVIGGIN

SEQ ID NO: 93 - protein, 732 aa, Homo sapiens
MERQVLLSEPEEAAALYRGLSRQPALSAACLGPEVTTQYGGQYRTVHTEWTQRDLERMENIRFCRQYLVFHDGDSVVFAGPAGNSVETRGELLSRESPSGTMKAVLRKAGGTGPGEEKQFLEVWEKNRKLKSFNLSALEKHGPVYEDDCFGCLSWSHSETHLLYVAEKKRPKAESFFQTKALDVSASDDEIARLKKPDQAIKGDQFVFYEDWGENMVSKSIPVLCVLDVESGNISVLEGVPENVSPGQAFWAPGDAGVVFVGWWHEPFRLGIRFCTNRRSALYYVDLIGGKCELLSDDSLAVSSPRLSPDQCRIVYLQYPSLIPHHQCSQLCLYDWYTKVTSVVVDVVPRQLGENFSGIYCSLLPLGCWSADSQRVVFDSAQRSRQDLFAVDTQVGTVTSLTAGGSGGSWKLLTIDQDLMVAQFSTPSLPPTLKVGFLPSAGKEQSVLWVSLEEAEPIPDIHWGIRVLQPPPEQENVQYAGLDFEAILLQPGSPPDKTQVPMVVMPHGGPHSSFVTAWMLFPAMLCKMGFAVLLVNYRGSTGFGQDSILSLPGNVGHQDVKDVQFAVEQVLQEEHFDASHVALMGGSHGGFISCHLIGQYPETYRACVARNPVINIASMLGSTDIPDWCVVEAGFPFSSDCLPDLSVWAEMLDKSPIRYIPQVKTPLLLMLGQEDRRVPFKQGMEYYRALKTRNVPVRLLLYPKSTHALSEVEVESDSFMNAVLWLRTHLGS

SEQ ID NO: 94 - protein, 87 aa, Homo sapiens
MSQAEFEKAAEEVRHLKTKPSDEEMLFIYGHYKQATVGDINTERPGMLDFTGKAKWDAWNELKGTSKEDAMKAYINKVEELKKKYGI

SEQ ID NO: 95 - protein, 180 aa, Homo sapiens
MADSELQLVEQRIRSFPDFPTPGVVFRDISPVLKDPASFRAAIGLLARHLKATHGGRIDYIAGLDSRGFLFGPSLAQELGLGCVLIRKRGKLPGPTLWASYSLEYGKAELEIQKDALEPGQRVVVVDDLLATGGTMNAACELLGRLQAEVLECVSLVELTSLKGREKLAPVPFFSLLQYE

SEQ ID NO: 96 - protein, 194 aa, Homo sapiens
MEEKLKKTKIIFVVGGPGSGKGTQCEKIVQKYGYTHLSTGDLLRSEVSSGSARGKKLSEIMEKGQLVPLETVLDMLRDAMVAKVNTSKGFLIDGYPREVQQGEEFERRIGQPTLLLYVDAGPETMTQRLLKRGETSGRVDDNEETIKKRLETYYKATEPVIAFYEKRGIVRKVNAEGSVDSVFSQVCTHLDALK

SEQ ID NO: 97 - protein, 475 aa, Homo sapiens
MADMQNLVERLERAVGRLEAVSHTSDMHRGYADSPSKAGAAPYVQAFDSLLAGPVAEYLKISKEIGGDVQKHAEMVHTGLKLERALLVTASQCQQPAENKLSDLLAPISEQIKEVITFREKNRGSKLFNHLSAVSESIQALGWVAMAPKPGPYVKEMNDAAMFYTNRVLKEYKDVDKKHVDWVKAYLSIWTELQAYIKEFHTTGLAWSKTGPVAKELSGLPSGPSAGSCPPPPPPCPPPPPVSTISCSYESASRSSLFAQINQGESITHALKHVSDDMKTHKNPALKAQSGPVRSGPKPFSAPKPQTSPSPKRATKKEPAVLELEGKKWRVENQENVSNLVIEDTELKQVAYIYKCVNTTLQIKGKINSITVDNCKKLGLVFDDVVGIVEIINSKDVKVQVMGKVPTISINKTDGCHAYLSKNSLDCEIVSAKSSEMNVLIPTEGGDFNEFPVPEQFKTLWNGQKLVTTVTEIAG

SEQ ID NO: 98 - protein, 76 aa, Homo sapiens
MASKGLQDLKQQVEGTAQEAVSAAGAAAQQVVDQATEAGQKAMDQLAKTTQETIDKTANQASDTFSGIGKKFGLLK

SEQ ID NO: 99 - protein, 715 aa, Homo sapiens
MARELYHEEFARAGKQAGLQVWRIEKLELVPVPQSAHGDFYVGDAYLVLHTAKTSRGFTYHLHFWLGKECSQDESTAAAIFTVQMDDYLGGKPVQNRELQGYESNDFVSYFKGGLKYKAGGVASGLNHVLTNDLTAKRLLHVKGRRVVRATEVPLSWDSFNKGDCFIIDLGTEIYQWCGSSCNKYERLKANQVATGIRYNERKGRSELIVVEEGSEPSELIKVLGEKPELPDGGDDDDIIADISNRKMAKLYMVSDASGSMRVTVVAEENPFSMAMLLSEECFILDHGAAKQIFVWKGKDANPQERKAAMKTAEEFLQQMNYSKNTQIQVLPEGGETPIFKQFFKDWRDKDQSDGFGKVYVTEKVAQIKQIPFDASKLHSSPQMAAQHNMVDDGSGKVEIWRVENNGRIQVDQNSYGEFYGGDCYIILYTYPRGQIIYTWQGANATRDELTTSAFLTVQLDRSLGGQAVQIRVSQGKEPVHLLSLFKDKPLIIYKNGTSKKGGQAPAPPTRLFQVRRNLASITRIVEVDVDANSLNSNDVFVLKLPQNSGYIWVGKGASQEEEKGAEYVASVLKCKTLRIQEGEEPEEFWNSLGGKKDYQTSPLLETQAEDHPPRLYGCSNKTGRFVIEEIPGEFTQDDLAEDDVMLLDAWEQIFIWIGKDANEVEKKESLKSAKMYLETDPSGRDKRTPIVIIKQGHEPPTFTGWFLGWDSSKW

SEQ ID NO: 100 - protein, 359 aa, Homo sapiens
MLSAASRVVSRAAVHCALRSPPPEARALAMSRPPPPRVASVLGTMEMGRRMDAPASAAAVRAFLERGHTELDTAFMYSDGQSETILGGLGLGLGGGDCRVKIATKANPWDGKSLKPDSVRSQLETSLKRLQCPQVDLFYLHAPDHGTPVEETLHACQRLHQEGKFVELGLSNYASWEVAEICTLCKSNGWILPTVYQGMYNATTRQVETELFPCLRHFGLRFYAYNPLAGGLLTGKYKYEDKDGKQPVGRFFGNSWAETYRNRFWKEHHFEAIALVEKALQAAYGASAPSVTSAALRWMYHHSQLQGAHGDAVILGMSSLEQLEQNLAATEEGPLEPAVVDAFNQAWHLVAHECPNYFR

SEQ ID NO: 101 - protein, 325 aa, Homo sapiens
MAASCVLLHTGQKMPLIGLGTWKSEPGQVKAAVKYALSVGYRHIDCAAIYGNEPEIGEALKEDVGPGKAVPREELFVTSKLWNTKHHPEDVEPALRKTLADLQLEYLDLYLMHWPYAFERGDNPFPKNADGTICYDSTHYKETWKALEALVAKGLVQALGLSNFNSRQIDDILSVASVRPAVLQVECHPYLAQNELIAHCQARGLEVTAYSPLGSSDRAWRDPDEPVLLEEPVVLALAEKYGRSPAQILLRWQVQRKVICIPKSITPSRILQNIKVFDFTFSPEEMKQLNALNKNWRYIVPMLTVDGKRVPRDAGHPLYPFNDPY

SEQ ID NO: 102 - protein, 375 aa, Homo sapiens
MSTAGKVIKCKAAVLWELKKPFSIEEVEVAPPKAHEVRIKMVAAGICRSDEHVVSGNLVTPLPVILGHEAAGIVESVGEGVTTVKPGDKVIPLFTPQCGKCRICKNPESNYCLKNDLGNPRGTLQDGTRRFTCSGKPIHHFVGVSTFSQYTVVDENAVAKIDAASPLEKVCLIGCGFSTGYGSAVKVAKVTPGSTCAVFGLGGVGLSVVMGCKAAGAARIIAVDINKDKFAKAKELGATECINPQDYKKPIQEVLKEMTDGGVDFSFEVIGRLDTMMASLLCCHEACGTSVIVGVPPDSQNLSINPMLLLTGRTWKGAIFGGFKSKESVPKLVADFMAKKFSLDALITNILPFEKINEGFDLLRSGKSIRTVLTF

SEQ ID NO: 103 - protein, 512 aa, Homo sapiens
MATANGAVENGQPDRKPPALPRPIRNLEVKFTKIFINNEWHESKSGKKFATCNPSTREQICEVEEGDKPDVDKAVEAAQVAFQRGSPWRRLDALSRGRLLHQLADLVERDRATLAALETMDTGKPFLHAFFIDLEGCIRTLRYFAGWADKIQGKTIPTDDNVVCFTRHEPIGVCGAITPWNFPLLMLVWKLAPALCCGNTMVLKPAEQTPLTALYLGSLIKEAGFPPGVVNIVPGFGPTVGAAISSHPQINKIAFTGSTEVGKLVKEAASRSNLKRVTLELGGKNPCIVCADADLDLAVECAHQGVFFNQGQCCTAASRVFVEEQVYSEFVRRSVEYAKKRPVGDPFDVKTEQGPQIDQKQFDKILELIESGKKEGAKLECGGSAMEDKGLFIKPTVFSEVTDNMRIAKEEIFGPVQPILKFKSIEEVIKRANSTDYGLTAAVFTKNLDKALKLASALESGTVWINCYNALYAQAPFGGFKMSGNGRELGEYALAEYTEVKTVTIKLGDKNP

SEQ ID NO: 104 - protein, 453 aa, Homo sapiens
MSKISEAVKRARAAFSSGRTRPLQFRIQQLEALQRLIQEQEQELVGALAADLHKNEWNAYYEEVVYVLEEIEYMIQKLPEWAADEPVEKTPQTQQDELYIHSEPLGVVLVIGTWNYPFNLTIQPMVGAIAAGNSVVLKPSELSENMASLLATIIPQYLDKDLYPVINGGVPETTELLKERFDHILYTGSTGVGKIIMTAAAKHLTPVTLELGGKSPCYVDKNCDLDVACRRIAWGKFMNSGQTCVAPDYILCDPSIQNQIVEKLKKSLKEFYGEDAKKSRDYGRIISARHFQRVMGLIEGQKVAYGGTGDAATRYIAPTILTDVDPQSPVMQEEIFGPVLPIVCVRSLEEAIQFINQREKPLALYMFSSNDKVIKKMIAETSSGGVAANDVIVHITLHSLPFGGVGNSGMGSYHGKKSFETFSHRRSCLVRPLMNDEGLKVRYPPSPAKMTQH

SEQ ID NO: 105 - protein, 200 aa, Homo sapiens
MALSWVLTVLSLLPLLEAQIPLCANLVPVPITNATLDQITGKWFYIASAFRNEEYNKSVQEIQATFFYFTPNKTEDTIFLREYQTRQDQCIYNTTYLNVQRENGTISRYVGGQEHFAHLLILRDTKTYMLAFDVNDEKNWGLSVYADKPETTKEQLGEFYEALDCLRIPKSDVVYTDWKKDKCEPLEKQHEKERKQEEGE

SEQ ID NO: 106 - protein, 491 aa, Homo sapiens
MALLWGLLVLSWSCLQGPCSVFSPVSAMEPLGRQLTSGPNQEQVSPLTLLKLGNQEPGGQTALKSPPGVCSRDPTPEQTHRLARAMMAFTADLFSLVAQTSTCPNLILSPLSVALALSHLALGAQNHTLQRLQQVLHAGSGPCLPHLLSRLCQDLGPGAFRLAARMYLQKGFPIKEDFLEQSEQLFGAKPVSLTGKQEDDLANINQWVKEATEGKIQEFLSGLPEDTVLLLLNAIHFQGFWRNKFDPSLTQRDSFHLDEQFTVPVEMMQARTYPLRWFLLEQPEIQVAHFPFKNNMSFVVLVPTHFEWNVSQVLANLSWDTLHPPLVWERPTKVRLPKLYLKHQMDLVATLSQLGLQELFQAPDLRGISEQSLVVSGVQHQSTLELSEVGVEAAAATSIAMSRMSLSSFSVNRPFLFFIFEDTTGLPLFVGSVRNPNPSAPRELKEQQDSPGNKDFLQSLKGFPRGDKLFGPDLKLVPPMEEDYPQFGSPK

SEQ ID NO: 107 - protein, 1474 aa, Homo sapiens
MGKNKLLHPSLVLLLLVLLPTDASVSGKPQYMVLVPSLLHTETTEKGCVLLSYLNETVTVSASLESVRGNRSLFTDLEAENDVLHCVAFAVPKSSSNEEVMFLTVQVKGPTQEFKKRTTVMVKNEDSLVFVQTDKSIYKPGQTVKFRVVSMDENFHPLNELIPLVYIQDPKGNRIAQWQSFQLEGGLKQFSFPLSSEPFQGSYKVVVQKKSGGRTEHPFTVEEFVLPKFEVQVTVPKIITILEEEMNVSVCGLYTYGKPVPGHVTVSICRKYSDASDCHGEDSQAFCEKFSGQLNSHGCFYQQVKTKVFQLKRKEYEMKLHTEAQIQEEGTVVELTGRQSSEITRTITKLSFVKVDSHFRQGIPFFGQVRLVDGKGVPIPNKVIFIRGNEANYYSNATTDEHGLVQFSINTTNVMGTSLTVRVNYKDRSPCYGYQWVSEEHEEAHHTAYLVFSPSKSFVHLEPMSHELPCGHTQTVQAHYILNGGTLLGLKKLSFYYLIMAKGGIVRTGTHGLLVKQEDMKGHFSISIPVKSDIAPVARLLIYAVLPTGDVIGDSAKYDVENCLANKVDLSFSPSQSLPASHAHLRVTAAPQSVCALRAVDQSVLLMKPDAELSASSVYNLLPEKDLTGFPGPLNDQDNEDCINRHNVYINGITYTPVSSTNEKDMYSFLEDMGLKAFTNSKIRKPKMCPQLQQYEMHGPEGLRVGFYESDVMGRGHARLVHVEEPHTETVRKYFPETWIWDLVVVNSAGVAEVGVTVPDTITEWKAGAFCLSEDAGLGISSTASLRAFQPFFVELTMPYSVIRGEAFTLKATVLNYLPKCIRVSVQLEASPAFLAVPVEKEQAPHCICANGRQTVSWAVTPKSLGNVNFTVSAEALESQELCGTEVPSVPEHGRKDTVIKPLLVEPEGLEKETTFNSLLCPSGGEVSEELSLKLPPNVVEESARASVSVLGDILGSAMQNTQNLLQMPYGCGEQNMVLFAPNIYVLDYLNETQQLTPEIKSKAIGYLNTGYQRQLNYKHYDGSYSTFGERYGRNQGNTWLTAFVLKTFAQARAYIFIDEAHITQALIWLSQRQKDNGCFRSSGSLLNNAIKGGVEDEVTLSAYITIALLEIPLTVTHPVVRNALFCLESAWKTAQEGDHGSHVYTKALLAYAFALAGNQDKRKEVLKSLNEEAVKKDNSVHWERPQKPKAPVGHFYEPQAPSAEVEMTSYVLLAYLTAQPAPTSEDLTSATNIVKWITKQQNAQGGFSSTQDTVVALHALSKYGAATFTRTGKAAQVTIQSSGTFSSKFQVDNNNRLLLQQVSLPELPGEYSMKVTGEGCVYLQTSLKYNILPEKEEFPFALGVQTLPQTCDEPKAHTSFQISLSVSYTGSRSASNMAIVDVKMVSGFIPLKPTVKMLERSNHVSRTEVSSNHVLIYLDKVSNQTLSLFFTVLQDVPVRDLKPAIVKVYDYYETDEFAIAEYNAPCSKDLGNA

SEQ ID NO: 108 - protein, 926 aa, Homo sapiens
MLQVHRTGLGRLGVSLSKGLHHKAVLAVRREDVNAWERRAPLAPKHIKGITNLGYKVLIQPSNRRAIHDKDYVKAGGILQEDISEACLILGVKRPPEEKLMSRKTYAFFSHTIKAQEANMGLLDEILKQEIRLIDYEKMVDHRGVRVVAFGQWAGVAGMINILHGMGLRLLALGHHTPFMHIGMAHNYRNSSQAVQAVRDAGYEISLGLMPKSIGPLTFVFTGTGNVSKGAQAIFNELPCEYVEPHELKEVSQTGDLRKVYGTVLSRHHHLVRKTDAVYDPAEYDKHPERYISRFNTDIAPYTTCLINGIYWEQNTPRLLTRQDAQSLLAPGKFSPAGVEGCPALPHKLVAICDISADTGGSIEFMTECTTIEHPFCMYDADQHIIHDSVEGSGILMCSIDNLPAQLPIEATECFGDMLYPYVEEMILSDATQPLESQNFSPVVRDAVITSNGTLPDKYKYIQTLRESRERAQSLSMGTRRKVLVLGSGYISEPVLEYLSRDGNIEITVGSDMKNQIEQLGKKYNINPVSMDICKQEEKLGFLVAKQDLVISLLPYVLHPLVAKACITNKVNMVTASYITPALKELEKSVEDAGITIIGELGLDPGLDHMLAMETIDKAKEVGATIESYISYCGGLPAPEHSNNPLRYKFSWSPVGVLMNVMQSATYLLDGKVVNVAGGISFLDAVTSMDFFPGLNLEGYPNRDSTKYAEIYGISSAHTLLRGTLRYKGYMKALNGFVKLGLINREALPAFRPEANPLTWKQLLCDLVGISPSSEHDVLKEAVLKKLGGDNTQLEAAEWLGLLGDEQVPQAESILDALSKHLVMKLSYGPEEKDMIVMRDSFGIRHPSGHLEHKTIDLVAYGDINGFSAMAKTVGLPTAMAAKMLLDGEIGAKGLMGPFSKEIYGPILERIKAEGIIYTTQSTIKP

SEQ ID NO: 109 - protein, 511 aa, Homo sapiens
MKLFWLLFTIGFCWAQYSSNTQQGRTSIVHLFEWRWVDIALECERYLAPKGFGGVQVSPPNENVAIHNPFRPWWERYQPVSYKLCTRSGNEDEFRNMVTRCNNVGVRIYVDAVINHMCGNAVSAGTSSTCGSYFNPGSRDFPAVPYSGWDFNDGKCKTGSGDIENYNDATQVRDCRLSGLLDLALGKDYVRSKIAEYMNHLIDIGVAGFRIDASKHMWPGDIKAILDKLHNLNSNWFPEGSKPFIYQEVIDLGGEPIKSSDYFGNGRVTEFKYGAKLGTVIRKWNGEKMSYLKNWGEGWGFMPSDRALVFVDNHDNQRGHGAGGASILTFWDARLYKMAVGFMLAHPYGFTRVMSSYRWPRYFENGKDVNDWVGPPNDNGVTKEVTINPDTTCGNDWVCEHRWRQIRNMVNFRNVVDGQPFTNWYDNGSNQVAFGRGNRGFIVFNNDDWTFSLTLQTGLPAGTYCDVISGDKINGNCTGIKIYVSDDGKAHFSISNSAEDPFIAIHAESKL

SEQ ID NO: 110 - protein, 650 aa, Homo sapiens
MASGEHSPGSGAARRPLHSAQAVDVASASNFRAFELLHLHLDLRAEFGPPGPGAGSRGLSGTAVLDLRCLEPEGAAELRLDSHPCLEVTAAALRRERPGSEEPPAEPVSFYTQPFSHYGQALCVSFPQPCRAAERLQVLLTYRVGEGPGVCWLAPEQTAGKKKPFVYTQGQAVLNRAFFPCFDTPAVKYKYSALIEVPDGFTAVMSASTWEKRGPNKFFFQMCQPIPSYLIALAIGDLVSAEVGPRSRVWAEPCLIDAAKEEYNGVIEEFLATGEKLFGPYVWGRYDLLFMPPSFPFGGMENPCLTFVTPCLLAGDRSLADVIIHEISHSWFGNLVTNANWGEFWLNEGFTMYAQRRISTILFGAAYTCLEAATGRALLRQHMDITGEENPLNKLRVKIEPGVDPDDTYNETPYEKGFCFVSYLAHLVGDQDQFDSFLKAYVHEFKFRSILADDFLDFYLEYFPELKKKRVDIIPGFEFDRWLNTPGWPPYLPDLSPGDSLMKPAEELAQLWAAEELDMKAIEAVAISPWKTYQLVYFLDKILQKSPLPPGNVKKLGDTYPSISNARNAELRLRWGQIVLKNDHQEDFWKVKEFLHNQGKQKYTLPLYHAMMGGSEVAQTLAKETFASTASQLHSNVVNYVQQIVAPKGS

SEQ ID NO: 111 - protein, 132 aa, Homo sapiens
MKSSGLFPFLVLLALGTLAPWAVEGSGKSFKAGVCPPKKSAQCLRYKKPECQSDWQCPGKKRCCPDTCGIKCLDPVDTPNPTRRKPGKCPVTYGQCLMLNPPNFCEMDGQCKRDLKCCMGMCGKSCVSPVKA

SEQ ID NO: 112 - protein, 412 aa, Homo sapiens
MSSKGSVVLAYSGGLDTSCILVWLKEQGYDVIAYLANIGQKEDFEEARKKALKLGAKKVFIEDVSREFVEEFIWPAIQSSALYEDRYLLGTSLARPCIARKQVEIAQREGAKYVSHGATGKGNDQVRFELSCYSLAPQIKVIAPWRMPEFYNRFKGRNDLMEYAKQHGIPIPVTPKNPWSMDENLMHISYEAGILENPKNQAPPGLYTKTQDPAKAPNTPDILEIEFKKGVPVKVTNVKDGTTHQTSLELFMYLNEVAGKHGVGRIDIVENRFIGMKSRGIYETPAGTILYHAHLDIEAFTMDREVRKIKQGLGLKFAELVYTGFWHSPECEFVRHCIAKSQERVEGKVQVSVLKGQVYILGRESPLSLYNEELVSMNVQGDYEPTDATGFININSLRLKEYHRLQSKVTAK

SEQ ID NO: 113 - protein, 413 aa, Homo sapiens
MAPPSVFAEVPQAQPVLVFKLTADFREDPDPRKVNLGVGAYRTDDCHPWVLPVVKKVEQKIANDNSLNHEYLPILGLAEFRSCASRLALGDDSPALKEKRVGGVQSLGGTGALRIGADFLARWYNGTNNKNTPVYVSSPTWENHNAVFSAAGFKDIRSYRYWDAEKRGLDLQGFLNDLENAPEFSIVVLHACAHNPTGIDPTPEQWKQIASVMKHRFLFPFFDSAYQGFASGNLERDAWAIRYFVSEGFEFFCAQSFSKNFGLYNERVGNLTVVGKEPESILQVLSQMEKIVRITWSNPPAQGARIVASTLSNPELFEEWTGNVKTMADRILTMRSELRARLEALKTPGTWNHITDQIGMFSFTGLNPKQVEYLVNEKHIYLLPSGRINVSGLTTKNLDYVATSIHEAVTKIQ

SEQ ID NO: 114 - protein, 413 aa, Homo sapiens; identical to SEQ ID NO: 113

SEQ ID NO: 115 - protein, 4391 aa, Homo sapiens
MGWRAAGALLLALLLHGRLLAVTHGLRAYDGLSLPEDIETVTASQMRWTHSYLSDDEDMLADSISGDDLGSGDLGSGDFQMVYFRALVNFTRSIEYSPQLEDAGSREFREVSEAVVDTLESEYLKIPGDQVVSVVFIKELDGWVFVELDVGSEGNADGAQIQEMLLRVISSGSVASYVTSPQGFQFRRLGTVPQFPRACTEAEFACHSYNECVALEYRCDRRPDCRDMSDELNCEEPVLGISPTFSLLVETTSLPPRPETTIMRQPPVTHAPQPLLPGSVRPLPCGPQEAACRNGHCIPRDYLCDGQEDCEDGSDELDCGPPPPCEPNEFPCGNGHCALKLWRCDGDFDCEDRTDEANCPTKRPEEVCGPTQFRCVSTNMCIPASFHCDEESDCPDRSDEFGCMPPQVVTPPRESIQASRGQTVTFTCVAIGVPTPIINWRLNWGHIPSHPRVTVTSEGGRGTLIIRDVKESDQGAYTCEAMNARGMVFGIPDGVLELVPQRGPCPDGHFYLEHSAACLPCFCFGITSVCQSTRRFRDQIRLRFDQPDDFKGVNVTMPAQPGTPPLSSTQLQIDPSLHEFQLVDLSRRFLVHDSFWALPEQFLGNKVDSYGGSLRYNVRYELARGMLEPVQRPDVVLMGAGYRLLSRGHTPTQPGALNQRQVQFSEEHWVHESGRPVQRAELLQVLQSLEAVLIQTVYNTKMASVGLSDIAMDTTVTHATSHGRAHSVEECRCPIGYSGLSCESCDAHFTRVPGGPYLGTCSGCNCNGHASSCDPVYGHCLNCQHNTEGPQCNKCKAGFFGDAMKATATSCRPCPCPYIDASRRFSDTCFLDTDGQATCDACAPGYTGRRCESCAPGYEGNPIQPGGKCRPVNQEIVRCDERGSMGTSGEACRCKNNVVGRLCNECADGSFHLSTRNPDGCLKCFCMGVSRHCTSSSWSRAQLHGASEEPGHFSLTNAASTHTTNEGIFSPTPGELGFSSFHRLLSGPYFWSLPSRFLGDKVTSYGGELRFTVTQRSQPGSTPLHGQPLVVLQGNNIILEHHVAQEPSPGQPSTFIVPFREQAWQRPDGQPATREHLLMALAGIDTLLIRASYAQQPAESRVSGISMDVAVPEETGQDPALEVEQCSCPPGYRGPSCQDCDTGYTRTPSGLYLGTCERCSCHGHSEACEPETGACQGCQHHTEGPRCEQCQPGYYGDAQRGTPQDCQLCPCYGDPAAGQAAHTCFLDTDGHPTCDACSPGHSGRHCERCAPGYYGNPSQGQPCQRDSQVPGPIGCNCDPQGSVSSQCDAAGQCQCKAQVEGLTCSHCRPHHFHLSASNPDGCLPCFCMGITQQCASSAYTRHLISTHFAPGDFQGFALVNPQRNSRLTGEFTVEPVPEGAQLSFGNFAQLGHESFYWQLPETYQGDKVAAYGGKLRYTLSYTAGPQGSPLSDPDVQITGNNIMLVASQPALQGPERRSYEIMFREEFWRRPDGQPATREHLLMALADLDELLIRATFSSVPLAASISAVSLEVAQPGPSNRPRALEVEECRCPPGYIGLSCQDCAPGYTRTGSGLYLGHCELCECNGHSDLCHPETGACSQCQHNAAGEFCELCAPGYYGDATAGTPEDCQPCACPLTNPENMFSRTCESLGAGGYRCTACEPGYTGQYCEQCGPGYVGNPSVQGGQCLPETNQAPLVVEVHPARSIVPQGGSHSLRCQVSGSPPHYFYWSREDGRPVPSGTQQRHQGSELHFPSVQPSDAGVYICTCRNLHQSNTSRAELLVTEAPSKPITVTVEEQRSQSVRPGADVTFICTAKSKSPAYTLVWTRLHNGKLPTRAMDFNGILTIRNVQLSDAGTYVCTGSNMFAMDQGTATLHVQASGTLSAPVVSIHPPQLTVQPGQLAEFRCSATGSPTPTLEWTGGPGGQLPAKAQIHGGILRLPAVEPTDQAQYLCRAHSSAGQQVARAVLHVHGGGGPRVQVSPERTQVHAGRTVRLYCRAAGVPSATITWRKEGGSLPPQARSERTDIATLLIPAITTADAGFYLCVATSPAGTAQARIQVVVLSASDASPPPVKIESSSPSVTEGQTLDLNCVVAGSAHAQVTWYRRGGSLPPHTQVHGSRLRLPQVSPADSGEYVCRVENGSGPKEASITVSVLHGTHSGPSYTPVPGSTRPIRIEPSSSHVAEGQTLDLNCVVPGQAHAQVTWHKRGGSLPARHQTHGSLLRLHQVTPADSGEYVCHVVGTSGPLEASVLVTIEASVIPGPIPPVRIESSSSTVAEGQTLDLSCVVAGQAHAQVTWYKRGGSLPARHQVRGSRLYIFQASPADAGQYVCRASNGMEASITVTVTGTQGANLAYPAGSTQPIRIEPSSSQVAEGQTLDLNCVVPGQSHAQVTWHKRGGSLPVRHQTHGSLLRLYQASPADSGEYVCRVLGSSVPLEASVLVTIEPAGSVPALGVTPTVRIESSSSQVAEGQTLDLNCLVAGQAHAQVTWHKRGGSLPARHQVHGSRLRLLQVTPADSGEYVCRVVGSSGTQEASVLVTIQQRLSGSHSQGVAYPVRIESSSASLANGHTLDLNCLVASQAPHTITWYKRGGSLPSRHQIVGSRLRIPQVTPADSGEYVCHVSNGAGSRETSLIVTIQGSGSSHVPSVSPPIRIESSSPTVVEGQTLDLNCVVARQPQAIITWYKRGGSLPSRHQTHGSHLRLHQMSVADSGEYVCRANNNIDALEASIVISVSPSAGSPSAPGSSMPIRIESSSSHVAEGETLDLNCVVPGQAHAQVTWHKRGGSLPSHHQTRGSRLRLHHVSPADSGEYVCRVMGSSGPLEASVLVTIEASGSSAVHVPAPGGAPPIRIEPSSSRVAEGQTLDLKCVVPGQAHAQVTWHKRGGNLPARHQVHGPLLRLNQVSPADSGEYSCQVTGSSGTLEASVLVTIEPSSPGPIPAPGLAQPIYIEASSSHVTEGQTLDLNCVVPGQAHAQVTWYKRGGSLPARHQTHGSQLRLHLVSPADSGEYVCRAASGPGPEQEASFTVTVPPSEGSSYRLRSPVISIDPPSSTVQQGQDASFKCLIHDGAAPISLEWKTRNQELEDNVHISPNGSIITIVGTRPSNHGTYRCVASNAYGVAQSVVNLSVHGPPTVSVLPEGPVWVKVGKAVTLECVSAGEPRSSARWTRISSTPAKLEQRTYGLMDSHAVLQISSAKPSDAGTYVCLAQNALGTAQKQVEVIVDTGAMAPGAPQVQAEEAELTVEAGHTATLRCSATGSPAPTIHWSKLRSPLPWQHRLEGDTLIIPRVAQQDSGQYICNATSPAGHAEATIILHVESPPYATTVPEHASVQAGETVQLQCLAHGTPPLTFQWSRVGSSLPGRATARNELLHFERAAPEDSGRYRCRVTNKVGSAEAFAQLLVQGPPGSLPATSIPAGSTPTVQVTPQLETKSIGASVEFHCAVPSDRGTQLRWFKEGGQLPPGHSVQDGVLRIQNLDQSCQGTYICQAHGPWGKAQASAQLVIQALPSVLINIRTSVQTVVVGHAVEFECLALGDPKPQVTWSKVGGHLRPGIVQSGGVVRIAHVELADAGQYRCTATNAAGTTQSHVLLLVQALPQISMPQEVRVPAGSAAVFPCIASGYPTPDISWSKLDGSLPPDSRLENNMLMLPSVRPQDAGTYVCTATNRQGKVKAFAHLQVPERVVPYFTQTPYSFLPLPTIKDAYRKFEIKITFRPDSADGMLLYNGQKRVPGSPTNLANRQPDFISFGLVGGRPEFRFDAGSGMATIRHPTPLALGHFHTVTLLRSLTQGSLIVGDLAPVNGTSQGKFQGLDLNEELYLGGYPDYGAIPKAGLSSGFIGCVRELRIQGEEIVFHDLNLTAHGISHCPTCRDRPCQNGGQCHDSESSSYVCVCPAGFTGSRCEHSQALHCHPEACGPDATCVNRPDGRGYTCRCHLGRSGLRCEEGVTVTTPSLSGAGSYLALPALTNTHHELRLDVEFKPLAPDGVLLFSGGKSGPVEDFVSLAMVGGHLEFRYELGSGLAVLRSAEPLALGRWHRVSAERLNKDGSLRVNGGRPVLRSSPGKSQGLNLHTLLYLGGVEPSVPLSPATNMSAHFRGCVGEVSVNGKRLDLTYSFLGSQGIGQCYDSSPCERQPCQHGATCMPAGEYEFQCLCRDGFKGDLCEHEENPCQLREPCLHGGTCQGTRCLCLPGFSGPRCQQGSGHGIAESDWHLEGSGGNDAPGQYGAYFHDDGFLAFPGHVFSRSLPEVPETIELEVRTSTASGLLLWQGVEVGEAGQGKDFISLGLQDGHLVFRYQLGSGEARLVSEDPINDGEWHRVTALREGRRGSIQVDGEELVSGRSPGPNVAVNAKGSVYIGGAPDVATLTGGRFSSGITGCVKNLVLHSARPGAPPPQPLDLQHRAQAGANTRPCPS

SEQ ID NO: 116 - protein, 119 aa, Homo sapiens
MSRSVALAVLALLSLSGLEAIQRTPKIQVYSRHPAENGKSNFLNCYVSGFHPSDIEVDLLKNGERIEKVEHSDLSFSKDWSFYLLYYTEFTPTEKDEYACRVNHVTLSQPKIVKWDRDM

SEQ ID NO: 117 - protein, 592 aa, Homo sapiens
MAPGQLALFSVSDKTGLVEFARNLTALGLNLVASGGTAKALRDAGLAVRDVSELTGFPEMLGGRVKTLHPAVHAGILARNIPEDNADMARLDFNLIRVVACNLYPFVKTVASPGVTVEEAVEQIDIGGVTLLRAAAKNHARVTVVCEPEDYVVVSTEMQSSESKDTSLETRRQLALKAFTHTAQYDEAISDYFRKQYSKGVSQMPLRYGMNPHQTPAQLYTLQPKLPITVLNGAPGFINLCDALNAWQLVKELKEALGIPAAASFKHVSPAGAAVGIPLSEDEAKVCMVYDLYKTLTPISAAYARARGADRMSSFGDFVALSDVCDVPTAKIISREVSDGIIAPGYEEEALTILSKKKNGNYCVLQMDQSYKPDENEVRTLFGLHLSQKRNNGVVDKSLFSNVVTKNKDLPESALRDLIVATIAVKYTQSNSVCYAKNGQVIGIGAGQQSRIHCTRLAGDKANYWWLRHHPQVLSMKFKTGVKRAEISNAIDQYVTGTIGEDEDLIKWKALFEEVPELLTEAEKKEWVEKLTEVSISSDAFFPFRDNVDRAKRSGVAYIAAPSGSAADKVVIEACDELGIILAHTNLRLFHH

SEQ ID NO: 118 - protein, 1038 aa, Homo sapiens
MTSSLQRPWRVPWLPWTILLVSTAAASQNQERLCAFKDPYQQDLGIGESRISHENGTILCSKGSTCYGLWEKSKGDINLVKQGCWSHIGDPQECHYEECVVTTTPPSIQNGTYRFCCCSTDLCNVNFTENFPPPDTTPLSPPHSFNRDETIIIALASVSVLAVLIVALCFGYRMLTGDRKQGLHSMNMMEAAASEPSLDLDNLKLLELIGRGRYGAVYKGSLDERPVAVKVFSFANRQNFINEKNIYRVPLMEHDNIARFIVGDERVTADGRMEYLLVMEYYPNGSLCKYLSLHTSDWVSSCRLAHSVTRGLAYLHTELPRGDHYKPAISHRDLNSRNVLVKNDGTCVISDFGLSMRLTGNRLVRPGEEDNAAISEVGTIRYMAPEVLEGAVNLRDCESALKQVDMYALGLIYWEIFMRCTDLFPGESVPEYQMAFQTEVGNHPTFEDMQVLVSREKQRPKFPEAWKENSLAVRSLKETIEDCWDQDAEARLTAQCAEERMAELMMIWERNKSVSPTVNPMSTAMQNERNLSHNRRVPKIGPYPDYSSSSYIEDSIHHTDSIVKNISSEHSMSSTPLTIGEKNRNSINYERQQAQARIPSPETSVTSLSTNTTTTNTTGLTPSTGMTTISEMPYPDETNLHTTNVAQSIGPTPVCLQLTEEDLETNKLDPKEVDKNLKESSDENLMEHSLKQFSGPDPLSSTSSSLLYPLIKLAVEATGQQDFTQTANGQACLIPDVLPTQIYPLPKQQNLPKRPTSLPLNTKNSTKEPRLKFGSKHKSNLKQVETGVAKMNTINAAEPHVVTVTMNGVAGRNHSVNSHAATTQYANGTVLSGQTTNIVTHRAQEMLQNQFIGEDTRLNINSSPDEHEPLLRREQQAGHDEGVLDRLVDRRERPLEGGRTNSNNNNSNPCSEQDVLAQGVPSTAADPGPSKPRRAQRPNSLDLSATNVLDGSSIQIGESTQDGKSGSGEKIKKRVKTPYSLKRWRPSTWVISTESLDCEVNNNGSNRAVHSKSSTAVYLAEGGTATTMVSKDIGMNCL

SEQ ID NO: 119 - protein, 597 aa, Homo sapiens
MHPPKTPSGALHRKRKMAAWPFSRLWKVSDPILFQMTLIAALLPAVLGNCGPPPTLSFAAPMDITLTETRFKTGTTLKYTCLPGYVRSHSTQTLTCNSDGEWVYNTFCIYKRCRHPGELRNGQVEIKTDLSFGSQIEFSCSEGFFLIGSTTSRCEVQDRGVGWSHPLPQCEIVKCKPPPDIRNGRHSGEENFYAYGFSVTYSCDPRFSLLGHASISCTVENETIGVWRPSPPTCEKITCRKPDVSHGEMVSGFGPIYNYKDTIVFKCQKGFVLRGSSVIHCDADSKWNPSPPACEPNSCINLPDIPHASWETYPRPTKEDVYVVGTVLRYRCHPGYKPTTDEPTTVICQKNLRWTPYQGCEALCCPEPKLNNGEITQHRKSRPANHCVYFYGDEISFSCHETSRFSAICQGDGTWSPRTPSCGDICNFPPKIAHGHYKQSSSYSFFKEEIIYECDKGYILVGQAKLSCSYSHWSAPAPQCKALCRKPELVNGRLSVDKDQYVEPENVTIQCDSGYGVVGPQSITCSGNRTWYPEVPKCEWETPEGCEQVLTGKRLMQCLPNPEDVKMALEVYKLSLEIEQLELQRDSARQSTLDKEL

SEQ ID NO: 120 - protein, 275 aa, Homo sapiens
MQCHRDLALSQALWGWQLSKQSGWAHPSLPHSPLPSTVHSCSWAPPHLQRHLPLATVSPGTTQLTQGPAGRTLGQTQASCPEPRPSMDAVDATMEKLRAQCLSRGASGIQGLARFFRQLDRDGSRSLDADEFRQGLAKLGLVLDQAEAEGVCRKWDRNGSGTLDLEEFLRALRPPMSQAREAVIAAAFAKLDRSGDGVVTVDDLRGVYSGRAHPKVRSGEWTEDEVLRRFLDNFDSSEKDGQVTLAEFQDYYSGVSASMNTDEEFVAMMTSAWQL

SEQ ID NO: 121 - protein, 149 aa, Homo sapiens [sequence omitted]

SEQ ID NO: 122 - protein, 149 aa, Homo sapiens
MADQLTEEQVTEFKEAFSLFDKDGDGCITTRELGTVMRSLGQNPTEAELRDMMSEIDRDGNGTVDFPEFLGMMARKMKDTDNEEEIREAFRVFDKDGNGFVSAAELRHVMTRLGEKLSDEEVDEMIRAADTDGDGQVNYEEFVRVLVSK

SEQ ID NO: 123 - protein, 315 aa, Homo sapiens
MDLRQFLMCLSLCTAFALSKPTEKKDRVHHEPQLSDKVHNDAQSFDYDHDAFLGAEEAKTFDQLTPEESKERLGKIVSKIDGDKDGFVTVDELKDWIKFAQKRWIYEDVERQWKGHDLNEDGLVSWEEYKNATYGYVLDDPDPDDGFNYKQMMVRDERRFKMADKDGDLIATKEEFTAFLHPEEYDYMKDIVVQETMEDIDKNADGFIDLEEYIGDMYSHDGNTDEPEWVKTEREQFVEFRDKNRDGKMDKEETKDWILPSDYDHAEAEARHLVYESDQNKDGKLTKEEIVDKYDLFVGSQATDFGEALVRHDEF

SEQ ID NO: 124 - protein, 262 aa, Homo sapiens
MSRLSWGYREHNGPIHWKEFFPIADGDQQSPIEIKTKEVKYDSSLRPLSIKYDPSSAKIISNSGHSFNVDFDDTENKSVLRGGPLTGSYRLRQVHLHWGSADDHGSEHIVDGVSYAAELHVVHWNSDKYPSFVEAAHEPDGLAVLGVFLQIGEPNSQLQKITDTLDSIKEKGKQTRFTNFDLLSLLPPSWDYWTYPGSLTVPPLLESVTWIVLKQPINISSQQLAKFRSLLCTAEGEAAAFLVSNHRPPQPLKGRKVRASFH

SEQ ID NO: 125 - protein, 714 aa, Homo sapiens; identical to SEQ ID NO: 60

SEQ ID NO: 126 - protein, 268 aa, Homo sapiens
MFLVNSFLKGGGGGGGGGGGLGGGLGNVLGGLISGAGGGGGGGGGGGGGGGGGGGGTAMRILGGVISAISEAAAQYNPEPPPPRTHYSNIEANESEEVRQFRRLFAQLAGDDMEVSATELMNILNKVVTRHPDLKTDGFGIDTCRSMVAVMDSDTTGKLGFEEFKYLWNNIKRWQAIYKQFDTDRSGTICSSELPGAFEAAGFHLNEHLYNMIIRRYSDESGNMDFDNFISCLVRLDAMFRAFKSLDKDGTGQIQVNIQEWLQLTMYS

SEQ ID NO: 127 - protein, 277 aa, Homo sapiens
MSSGIHVALVTGGNKGIGLAIVRDLCRLFSGDVVLTARDVTRGQAAVQQLQAEGLSPRFHQLDIDDLQSIRALRDFLRKEYGGLDVLVNNAGIAFKVADPTPFHIQAEVTMKTNFFGTRDVCTELLPLIKPQGRVVNVSSIMSVRALKSCSPELQQKFRSETITEEELVGLMNKFVEDTKKGVHQKEGWPSSAYGVTKIGVTVLSRIHARKLSEQRKGDKILLNACCPGWVRTDMAGPKATKSPEEGAETPVYLALLPPDAEGPHGQFVSEKRVEQW

SEQ ID NO: 128 - protein, 242 aa, Homo sapiens
MSNPRSLEEEKYDMSGARLALILCVTKAREGSEEDLDALEHMFRQLRFESTMKRDPTAEQFQEELEKFQQAIDSREDPVSCAFVVLMAHGREGFLKGEDGEMVKLENLFEALNNKNCQALRAKPKVYIIQACRGEQRDPGETVGGDEIVMVIKDSPQTIPTYTDALHVYSTVEGYIAYRHDQKGSCFIQTLVDVFTKRKGHILELLTEVTRRMAEAELVQEGKARKTNPEIQSTLRKRLYLQ

SEQ ID NO: 129 - protein, 527 aa, Homo sapiens
MADSRDPASDQMQHWKEQRAAQKADVLTTGAGNPVGDKLNVITVGPRGPLLVQDVVFTDEMAHFDRERIPERVVHAKGAGAFGYFEVTHDITKYSKAKVFEHIGKKTPIAVRFSTVAGESGSADTVRDPRGFAVKFYTEDGNWDLVGNNTPIFFIRDPILFPSFIHSQKRNPQTHLKDPDMVWDFWSLRPESLHQVSFLFSDRGIPDGHRHMNGYGSHTFKLVNANGEAVYCKFHYKTDQGIKNLSVEDAARLSQEDPDYGIRDLFNAIATGKYPSWTFYIQVMTFNQAETFPFNPFDLTKVWPHKDYPLIPVGKLVLNRNPVNYFAEVEQIAFDPSNMPPGIEASPDKMLQGRLFAYPDTHRHRLGPNYLHIPVNCPYRARVANYQRDGPMCMQDNQGGAPNYYPNSFGAPEQQPSALEHSIQYSGEVRRFNTANDDNVTQVRAFYVNVLNEEQRKRLCENIAGHLKDAQIFIQKKAVKNFTEVHPDYGSHIQALLDKYNAEKPKNAIHTFVQSGSHLAAREKANL

SEQ ID NO: 130 - protein, 271 aa, Homo sapiens
MPEAPPLLLAAVLLGLVLLVVLLLLLRHWGWGLCLIGWNEFILQPIHNLLMGDTKEQRILNHVLQHAEPGNAQSVLEAIDTYCEQKEWAMNVGDKKGKIVDAVIQEHQPSVLLELGAYCGYSAVRMARLLSPGARLITIEINPDCAAITQRMVDFAGVKDKVTLVVGASQDIIPQLKKKYDVDTLDMVFLDHWKDRYLPDTLLLEECGLLRKGTVLLADNVICPGAPDFLAHVRGSSCFECTHYQSFLEYREVVDGLEKAIYKGPGSEAGP

SEQ ID NO: 131 - protein, 339 aa, Homo sapiens
MWQLWASLCCLLVLANARSRPSFHPLSDELVNYVNKRNTTWQAGHNFYNVDMSYLKRLCGTFLGGPKPPQRVMFTEDLKLPASFDAREQWPQCPTIKEIRDQGSCGSCWAFGAVEAISDRICIHTNAHVSVEVSAEDLLTCCGSMCGDGCNGGYPAEAWNFWTRKGLVSGGLYESHVGCRPYSIPPCEHHVNGSRPPCTGEGDTPKCSKICEPGYSPTYKQDKHYGYNSYSVSNSEKDIMAEIYKNGPVEGAFSVYSDFLLYKSGVYQHVTGEMMGGHAIRILGWGVENGTPYWLVANSWNTDWGDNGFFKILRGQDHCGIESEVVAGIPRTDQYWEKI

SEQ ID NO: 132 - protein, 1065 aa, Homo sapiens
MKILILGIFLFLCSTPAWAKEKHYYIGIIETTWDYASDHGEKKLISVDTEHSNIYLQNGPDRIGRLYKKALYLQYTDETFRTTIEKPVWLGFLGPIIKAETGDKVYVHLKNLASRPYTFHSHGITYYKEHEGAIYPDNTTDFQRADDKVYPGEQYTYMLLATEEQSPGEGDGNCVTRIYHSHIDAPKDIASGLIGPLIICKKDSLDKEKEKHIDREFVVMFSVVDENFSWYLEDNIKTYCSEPEKVDKDNEDFQESNRMYSVNGYTFGSLPGLSMCAEDRVKWYLFGMGNEVDVHAAFFHGQALTNKNYRIDTINLFPATLFDAYMVAQNPGEWMLSCQNLNHLKAGLQAFFQVQECNKSSSKDNIRGKHVRHYYIAAEEIIWNYAPSGIDIFTKENLTAPGSDSAVFFEQGTTRIGGSYKKLVYREYTDASFTNRKERGPEEEHLGILGPVIWAEVGDTIRVTFHNKGAYPLSIEPIGVRFNKNNEGTYYSPNYNPQSRSVPPSASHVAPTETFTYEWTVPKEVGPTNADPVCLAKMYYSAVDPTKDIFTGLIGPMKICKKGSLHANGRQKDVDKEFYLFPTVFDENESLLLEDNIRMFTTAPDQVDKEDEDFQESNKMHSMNGFMYGNQPGLTMCKGDSVVWYLFSAGNEADVHGIYFSGNTYLWRGERRDTANLFPQTSLTLHMWPDTEGTFNVECLTTDHYTGGMKQKYTVNQCRRQSEDSTFYLGERTYYIAAVEVEWDYSPQREWEKELHHLQEQNVSNAFLDKGEFYIGSKYKKVVYRQYTDSTFRVPVERKAEEEHLGILGPQLHADVGDKVKIIFKNMATRPYSIHAHGVQTESSTVTPTLPGETLTYVWKIPERSGAGTEDSACIPWAYYSTVDQVKDLYSGLIGPLIVCRRPYLKVFNPRRKLEFALLFLVFDENESWYLDDNIKTYSDHPEKVNKDDEEFIESNKMHAINGRMFGNLQGLTMHVGDEVNWYLMGMGNEIDLHTVHFHGHSFQYKHRGVYSSDVFDIFPGTYQTLEMFPRTPGIWLLHCHVTDHIHAGMETTYTVLQNEDTKSG

SEQ ID NO: 133 - protein, 224 aa, Homo sapiens
MSVFGKLFGAGGGKAGKGGPTPQEAIQRLRDTEEMLSKKQEFLEKKIEQELTAAKKHGTKNKRAALQALKRKKRYEKQLAQIDGTLSTIEFQREALENANTNTEVLKNMGYAAKAMKAAHDNMDIDKVDELMQDIADQQELAEEISTAISKPVGFGEEFDEDELMAELEELEQEELDKNLLEISGPETVPLPNVPSIALPSKPAKKKEEEDDDMKELENWAGSM

SEQ ID NO: 134 - protein, 390 aa, Homo sapiens
MGATTMDQKSLWAGVVVLLLLQGGSAYKLVCYFTNWSQDRQEPGKFTPENIDPFLCSHLIYSFASIENNKVIIKDKSEVMLYQTINSLKTKNPKLKILLSIGGYLFGSKGFHPMVDSSTSRLEFINSIILFLRNHNFDGLDVSWIYPDQKENTHFTVLIHELAEAFQKDFTKSTKERLLLTAGVSAGRQMIDNSYQVEKLAKDLDFINLLSFDFHGSWEKPLITGHNSPLSKGWQDRGPSSYYNVEYAVGYWIHKGMPSEKVVMGIPTYGHSFTLASAETTVGAPASGPGAAGPITESSGFLAYYEICQFLKGAKITRLQDQQVPYAVKGNQWVGYDDVKSMETKVQFLKNLNLGGAMIWSIDMDDFTGKSCNQGPYPLVQAVKRSLGSL

SEQ ID NO: 135 - protein, 241 aa, Homo sapiens
MAEEQPQVELFVKAGSDGAKIGNCPFSQRLFMVLWLKGVTFNVTTVDTKRRTETVQKLCPGGQLPFLLYGTEVHTDTNKIEEFLEAVLCPPRYPKLAALNPESNTAGLDIFAKFSAYIKNSNPALNDNLEKGLLKALKVLDNYLTSPLPEEVDETSAEDEGVSQRKFLDGNELTLADCNLLPKLHIVQVVCKKYRGFTIPEAFRGVHRYLSNAYAREEFASTCPDDEEIELAYEQVAKALK

SEQ ID NO: 136 - protein, 280 aa, Homo sapiens
MAALAPLPPLPAQFKSIQHHLRTAQEHDKRDPVVAYYCRLYAMQTGMKIDSKTPECRKFLSKLMDQLEALKKQLGDNEAITQEIVGCAHLENYALKMFLYADNEDRAGRFHKNMIKSFYTASLLIDVITVFGELTDENVKHRKYARWKATYIHNCLKNGETPQAGPVGIEEDNDIEENEDAGAASLPTQPTQPSSSSTYDPSNMPSGNYTGIQIPPGAHAPANTPAEVPHSTGDVRLTPEDFARAQKYCKYAGSALQYEDVSTAVQNLQKALKLLTTGRE

SEQ ID NO: 137 - protein, 245 aa, Homo sapiens
MDKNELVQKAKLAEQAERYDDMAACMKSVTEQGAELSNEERNLLSVAYKNVVGARRSSWRVVSSIEQKTEGAEKKQQMAREYREKIETELRDICNDVLSLLEKFLIPNASQAESKVFYLKMKGDYYRYLAEVAAGDDKKGIVDQSQQAYQEAFEISKKEMQPTHPIRLGLALNFSVFYYEILNSPEKACSLAKTAFDEAIAELDTLSEESYKDSTLIMQLLRDNLTLWTSDTQGDEAEAGEGGEN

SEQ ID NO: 138 - protein, 376 aa, Homo sapiens
MTDNELSALVVDNGSGMCKAGFGGDDAPRAVFPSMIGRPRHQGVMVGMGQKDCYVGDEAQSKRGVLTLKYPIEHGVVTNWDDMEKIWYHTFYNELRVAPDEHPILLTEAPLNPKINREKMTQIMFEAFNTPAMYVAIQAVLSLYASGRTTGIVMDSGDGVTHIVPIYEGYALPHAILRLDLAGRDLTDYLMKILTERGYNFTTTAEREIVRDVKEKLCYVALDFEQEMVRAAASSSPERSYELPDGQVITIGNERFRCPEAIFQPSFLGIESSGIHETTFNSIMKCDVDIRKDLYANTVLSGGSTMYPGIADRMQKEIITLAPSTMKIKIIAPPERKYSVWIGGSILASLSTFQQMWISKQEYDEAGPPIVHRKCF

SEQ ID NO: 139 - protein, 400 aa, Homo sapiens
MTSYSYRQSSATSSFGGLGGGSVRFGPGVAFRAPSIHGGSGGRGVSVSSARFVSSSSSGAYGGGYGGVLTASDGLLAGNEKLTMQNLNDRLASYLDKVRALEAANGELEVKIRDWYQKQGPGPSRDYSHYYTTIQDLRDKILGATIENSRIVLQIDNARLAADDFRTKFETEQALRMSVEADINGLRRVLDELTLARTDLEMQIEGLKEELAYLKKNHEEEISTLRGQVGGQVSVEVDSAPGTDLAKILSDMRSQYEVMAEQNRKDAEAWFTSRTEELNREVAGHTEQLQMSRSEVTDLRRTLQGLEIELQSQLSMKAALEDTLAETEARFGAQLAHIQALISGIEAQLGDVRADSERQNQEYQRLMDIKSRLEQEIATYRSLLEGQEDHYNNLSASKVL

SEQ ID NO: 140 - protein, 141 aa, Homo sapiens
MARPLCTLLLLMATLAGALASSSKEENRIIPGGIYDADLNDEWVQRALHFAISEYNKATEDEYYRRPLQVLRAREQTFGGVNYFFDVEVGRTICTKSQPNLDTCAFHEQPELQKKQLCSFEIYEVPWEDRMSLVNSRCQEA

SEQ ID NO: 141 - protein, 138 aa, Homo sapiens
MKFTTLLFLAAVAGALVYAEDASSDSTGADPAQEAGTSKPNEEISGPAEPASPPETTTTAQETSAAAVQGTAKVTSSRQELNPLKSIVEKSILLTEQALAKAGKGMHGGVPGGKQFIENGSEFAQKLLKKFSLLKPWA

SEQ ID NO: 142 - protein, 586 aa, Homo sapiens
MPKPINVRVTTMDAELEFAIQPNTTGKQLFDQVVKTIGLREVWYFGLHYVDNKGFPTWLKLDKKVSAQEVRKENPLQFKFRAKFYPEDVAEELIQDITQKLFFLQVKEGILSDEIYCPPETAVLLGSYAVQAKFGDYNKEVHKSGYLSSERLIPQRVMDQHKLTRDQWEDRIQVWHAEHRGMLKDNAMLEYLKIAQDLEMYGINYFEIKNKKGTDLWLGVDALGLNIYEKDDKLTPKIGFPWSEIRNISFNDKKFVIKPIDKKAPDFVFYAPRLRINKRILQLCMGNHELYMRRRKPDTIEVQQMKAQAREEKHQKQLERQQLETEKKRRETVEREKEQMMREKEELMLRLQDYEEKTKKAERELSEQIQRALQLEEERKRAQEEAERLEADRMAALRAKEELERQAVDQIKSQEQLAAELAEYTAKIALLEEARRRKEDEVEEWQHRAKEAQDDLVKTKEELHLVMTAPPPPPPPVYEPVSYHVQESLQDEGAEPTGYSAELSSEGIRDDRNEEKRITEAEKNERVQRQLLTLSSELSQARDENKRTHNDIIHNENMRQGRDKYKTLRQIRQGNTKQRIDEFEAL

SEQ ID NO: 143 - protein, 364 aa, Homo sapiens
MPYQYPALTPEQKKELSDIAHRIVAPGKGILAADESTGSIAKRLQSIGTENTEENRRFYRQLLLTADDRVNPCIGGVILFHETLYQKADDGRPFPQVIKSKGGVVGIKVDKGVVPLAGTNGETTTQGLDGLSERCAQYKKDGADFAKWRCVLKIGEHTPSALAIMENANVLARYASICQQNGIVPIVEPEILPDGDHDLKRCQYVTEKVLAAVYKALSDHHIYLEGTLLKPNMVTPGHACTQKFSHEEIAMATVTALRRTVPPAVTGITFLSGGQSEEEASINLNAINKCPLLKPWALTFSYGRALQASALKAWGGKKENLKAAQEEYVKRALANSLACQGKYTPSGQAGAAASESLFVSNHAY

SEQ ID NO: 144 - protein, 406 aa, Homo sapiens; identical to SEQ ID NO: 47

SEQ ID NO: 145 - protein, 641 aa, Homo sapiens
MAKAAAIGIDLGTTYSCVGVFQHGKVEIIANDQGNRTTPSYVAFTDTERLIGDAAKNQVALNPQNTVFDAKRLIGRKFGDPVVQSDMKHWPFQVINDGDKPKVQVSYKGETKAFYPEEISSMVLTKMKEIAEAYLGYPVTNAVITVPAYFNDSQRQATKDAGVIAGLNVLRIINEPTAAAIAYGLDRTGKGERNVLIFDLGGGTFDVSILTIDDGIFEVKATAGDTHLGGEDFDNRLVNHFVEEFKRKHKKDISQNKRAVRRLRTACERAKRTLSSSTQASLEIDSLFEGIDFYTSITRARFEELCSDLFRSTLEPVEKALRDAKLDKAQIHDLVLVGGSTRIPKVQKLLQDFFNGRDLNKSINPDEAVAYGAAVQAAILMGDKSENVQDLLLLDVAPLSLGLETAGGVMTALIKRNSTIPTKQTQIFTTYSDNQPGVLIQVYEGERAMTKDNNLLGRFELSGIPPAPRGVPQIEVTFDIDANGILNVTATDKSTGKANKITITNDKGRLSKEEIERMVQEAEKYKAEDEVQRERVSAKNALESYAFNMKSAVEDEGLKGKISEADKKKVLDKCQEVISWLDANTLAEKDEFEHKRKELEQVCNPIISGLYQGAGGPGPGGFGAQGPKGGSGSGPTIEEVD

SEQ ID NO: 146 - protein, 732 aa, Homo sapiens
MPEETQTQDQPMEEEEVETFAFQAEIAQLMSLIINTFYSNKEIFLRELISNSSDALDKIRYESLTDPSKLDSGKELHINLIPNKQDRTLTIVDTGIGMTKADLINNLGTIAKSGTKAFMEALQAGADISMIGQFGVGFYSAYLVAEKVTVITKHNDDEQYAWESSAGGSFTVRTDTGEPMGRGTKVILHLKEDQTEYLEERRIKEIVKKHSQFIGYPITLFVEKERDKEVSDDEAEEKEDKEEEKEKEEKESEDKPEIEDVGSDEEEEKKDGDKKKKKKIKEKYIDQEELNKTKPIWTRNPDDITNEEYGEFYKSLTNDWEDHLAVKHFSVEGQLEFRALLFVPRRAPFDLFENRKKKNNIKLYVRRVFIMDNCEELIPEYLNFIRGVVDSEDLPLNISREMLQQSKILKVIRKNLVKKCLELFTELAEDKENYKKFYEQFSKNIKLGIHEDSQNRKKLSELLRYYTSASGDEMVSLKDYCTRMKENQKHIYYITGETKDQVANSAFVERLRKHGLEVIYMIEPIDEYCVQQLKEFEGKTLVSVTKEGLELPEDEEEKKKQEEKKTKFENLCKIMKDILEKKVEKVVVSNRLVTSPCCIVTSTYGWTANMERIMKAQALRDNSTMGYMAAKKHLEINPDHSIIETLRQKAEADKNDKSVKDLVILLYETALLSSGFSLEDPQTHANRIYRMIKLGLGIDEDDPTADDTSAAVTEEMPPLEGDDDTSRMEEVD

SEQ ID NO: 147 - protein, 505 aa, Homo sapiens
MRLRRLALFPGVALLLAAARLAAASDVLELTDDNFESRISDTGSAGLMLVEFFAPWCGHCKRLAPEYEAAATRLKGIVPLAKVDCTANTNTCNKYGVSGYPTLKIFRDGEEAGAYDGPRTADGIVSHLKKQAGPASVPLRTEEEFKKFISDKDASIVGFFDDSFSEAHSEFLKAASNLRDNYRFAHTNVESLVNEYDDNGEGIILFRPSHLTNKFEDKTVAYTEQKMTSGKIKKFIQENIFGICPHMTEDNKDLIQGKDLLIAYYDVDYEKNAKGSNYWRNRVMMVAKKFLDAGHKLNFAVASRKTFSHELSDFGLESTAGEIPVVAIRTAKGEKFVMQEEFSRDGKALERFLQDYFDGNLKRYLKSEPIPESNDGPVKVVVAENFDEIVNNENKDVLIEFYAPWCGHCKNLEPKYKELGEKLSKDPNIVIAKMDATANDVPSPYEVRGFPTIYFSPANKKLNPKKYEGGRELSDFISYLQREATNPPVIQEEKPKKKKKAQEDL

SEQ ID NO: 148 - protein, 117 aa, Homo sapiens
MDMRVPAQLLGLLLLWLSGARCDIQMTQSPSSLSASVGDRVTITCQASQDISNYLNWYQQKPGKAPKLLIYDASNLETGVPSRFSGSGSGTDFTFTISSLQPEDIATYYCQQYDNLP

SEQ ID NO: 149 - protein, 115 aa, Homo sapiens
MEAPAQLLFLLLLWLPDTTGEIVLTQSPATLSLSPGERATLSCRASQSVSSYLAWYQQKPGQAPRLLIYDASNRATGIPARFSGSGSGTDFTLTISSLEPEDFAVYYCQQRSNWP

SEQ ID NO: 150 - protein, 445 aa, Homo sapiens
MNEEYDVIVLGTGLTECILSGIMSVNGKKVLHMDRNPYYGGESASITPLEDLYKRFKIPGSPPESMGRGRDWNVDLIPKFLMANGQLVKMLLYTEVTRYLDFKVTEGSFVYKGGKIYKVPSTEAEALASSLMGLFEKRRFRKFLVYVANFDEKDPRTFEGIDPKKTTMRDVYKKFDLGQDVIDFTGHALALYRTDDYLDQPCYETINRIKLYSESLARYGKSPYLYPLYGLGELPQGFARLSAIYGGTYMLNKPIEEIIVQNGKVIGVKSEGEIARCKQLICDPSYVKDRVEKVGQVIRVICILSHPIKNTNDANSCQIIIPQNQVNRKSDIYVCMISFAHNVAAQGKYIAIVSTTVETKEPEKEIRPALELLEPIEQKFVSISDLLVPKDLGTESQIFISRTYDATTHFETTCDDIKNIYKRMTGSEFDFEEMKRKKNDIYGED

SEQ ID NO: 151 - protein, 609 aa, Homo sapiens [sequence omitted]

SEQ ID NO: 152 - protein, 449 aa, Homo sapiens
MMKTLLLFVGLLLTWESGQVLGDQTVSDNELQEMSNQGSKYVNKEIQNAVNGVKQIKTLIEKTNEERKTLLSNLEEAKKKKEDALNETRESETKLKELPGVCNETMMALWEECKPCLKQTCMKFYARVCRSGSGLVGRQLEEFLNQSSPFYFWMNGDRIDSLLENDRQQTHMLDVMQDHFSRASSIIDELFQDRFFTREPQDTYHYLPFSLPHRRPHFFFPKSRIVRSLMPFSPYEPLNFHAMFQPFLEMIHEAQQAMDIHFHSPAFQHPPTEFIREGDDDRTVCREIRHNSTGCLRMKDQCDKCREILSVDCSTNNPSQAKLRRELDESLQVAERLTRKYNELLKSYQWKMLNTSSLLEQLNEQFNWVSRLANLTQGEDQYYLRVTTVASHTSDSDVPSGVTEVVVKLFDSDPITVTVPVEVSRKNPKFMETVAEKALQEYRKKHREE

SEQ ID NO: 153 - protein, 615 aa, Homo sapiens
MRALLLLGFLLVSLESTLSIPPWEAPKEHKYKAEEHTVVLTVTGEPCHFPFQYHRQLYHKCTHKGRPGPQPWCATTPNFDQDQRWGYCLEPKKVKDHCSKHSPCQKGGTCVNMPSGPHCLCPQHLTGNHCQKEKCFEPQLLRFFHKNEIWYRTEQAAVARCQCKGPDAHCQRLASQACRTNPCLHGGRCLEVEGHRLCHCPVGYTGAFCDVDTKASCYDGRGLSYRGLARTTLSGAPCQPWASEATYRNVTAEQARNWGLGGHAFCRNPDNDIRPWCFVLNRDRLSWEYCDLAQCQTPTQAAPPTPVSPRLHVPLMPAQPAPPKPQPTTRTPPQSQTPGALPAKREQPPSLTRNGPLSCGQRLRKSLSSMTRVVGGLVALRGAHPYIAALYWGHSFCAGSLIAPCWVLTAAHCLQDRPAPEDLTVVLGQERRNHSCEPCQTLAVRSYRLHEAFSPVSYQHDLALLRLQEDADGSCALLSPYVQPVCLPSGAARPSETTLCQVAGWGHQFEGAEEYASFLQEAQVPFLSLERCSAPDVHGSSILPGMLCAGFLEGGTDACQGDSGGPLVCEDQAAERRLTLQGIISWGSGCGDRNKPGVYTDVAYYLAWIREHTVS

SEQ ID NO: 154 - protein, 166 aa, Homo sapiens
MASGVAVSDGVIKVFNDMKVRKSSTPEEVKKRKKAVLFCLSEDKKNIILEEGKEILVGDVGQTVDDPYATFVKMLPDKDCRYALYDATYETKESKKEDLVFIFWAPESAPLKSKMIYASSKDAIKKKLTGIKHELQANCYEEVKDRCTLAEKLGGSAVISLEGKPL

SEQ ID NO: 155 - protein, 1744 aa, Homo sapiens
MRLLWGLIWASSFFTLSLQKPRLLLFSPSVVHLGVPLSVGVQLQDVPRGQVVKGSVFLRNPSRNNVPCSPKVDFTLSSERDFALLSLQVPLKDAKSCGLHQLLRGPEVQLVAHSPWLKDSLSRTTNIQGINLLFSSRRGHLFLQTDQPIYNPGQRVRYRVFALDQKMRPSTDTITVMVENSHGLRVRKKEVYMPSSIFQDDFVIPDISEPGTWKISARFSDGLESNSSTQFEVKKYVLPNFEVKITPGKPYILTVPGHLDEMQLDIQARYIYGKPVQGVAYVRFGLLDEDGKKTFFRGLESQTKLVNGQSHISLSKAEFQDALEKLNMGITDLQGLRLYVAAAIIESPGGEMEEAELTSWYFVSSPFSLDLSKTKRHLVPGAPFLLQALVREMSGSPASGIPVKVSATVSSPGSVPEVQDIQQNTDGSGQVSIPIIIPQTISELQLSVSAGSPHPAIARLTVAAPPSGGPGFLSIERPDSRPPRVGDTLNLNLRAVGSGATFSHYYYMILSRGQIVFMNREPKRTLTSVSVFVDHHLAPSFYFVAFYYHGDHPVANSLRVDVQAGACEGKLELSVDGAKQYRNGESVKLHLETDSLALVALGALDTALYAAGSKSHKPLNMGKVFEAMNSYDLGCGPGGGDSALQVFQAAGLAFSDGDQWTLSRKRLSCPKEKTTRKKRNVNFQKAINEKLGQYASPTAKRCCQDGVTRLPMMRSCEQRAARVQQPDCREPFLSCCQFAESLRKKSRDKGQAGLQRALEILQEEDLIDEDDIPVRSFFPENWLWRVETVDRFQILTLWLPDSLTTWEIHGLSLSKTKGLCVATPVQLRVFREFHLHLRLPMSVRRFEQLELRPVLYNYLDKNLTVSVHVSPVEGLCLAGGGGLAQQVLVPAGSARPVAFSVVPTAATAVSLKVVARGSFEFPVGDAVSKVLQIEKEGAIHREELVYELNPLDHRGRTLEIPGNSDPNMIPDGDFNSYVRVTASDPLDTLGSEGALSPGGVASLLRLPRGCGEQTMIYLAPTLAASRYLDKTEQWSTLPPETKDHAVDLIQKGYMRIQQFRKADGSYAAWLSRGSSTWLTAFVLKVLSLAQEQVGGSPEKLQETSNWLLSQQQADGSFQDLSPVIHRSMQGGLVGNDETVALTAFVTIALHHGLAVFQDEGAEPLKQRVEASISKASSFLGEKASAGLLGAHAAAITAYALTLTKAPADLRGVAHNNLMAMAQETGDNLYWGSVTGSQSNAVSPTPAPRNPSDPMPQAPALWIETTAYALLHLLLHEGKAEMADQAAAWLTRQGSFQGGFRSTQDTVIALDALSAYWIASHTTEERGLNVTLSSTGRNGFKSHALQLNNRQIRGLEEELQFSLGSKINVKVGGNSKGTLKVLRTYNVLDMKNTTCQDLQIEVTVKGHVEYTMEANEDYEDYEYDELPAKDDPDAPLQPVTPLQLFEGRRNRRRREAPKVVEEQESRVHYTVCIWRNGKVGLSGMAIADVTLLSGFHALRADLEKLTSLSDRYVSHFETEGPHVLLYFDSVPTSRECVGFEAVQEVPVGLVQPASATLYDYYNPERRCSVFYGAPSKSRLLATLCSAEVCQCAEGKCPRQRRALERGLQDEDGYRMKFACYYPRVEYGFQVKVLREDSRAAFRLFETKITQVLHFTKDVKAAANQMRNFLVRASCRLRLEPGKEYLIMGLDGATYDLEGHPQYLLDSNSWIEEMPSERLCRSTRQRAACAQLNDFLQEYGTQGCQV

SEQ ID NO: 156 - protein, 843 aa, Homo sapiens
MKVISLFILVGFIGEFQSFSSASSPVNCQWDFYAPWSECNGCTKTQTRRRSVAVYGQYGGQPCVGNAFETQSCEPTRGCPTEEGCGERFRCFSGQCISKSLVCNGDSDCDEDSADEDRCEDSERRPSCDIDKPPPNIELTGNGYNELTGQFRNRVINTKSFGGQCRKVFSGDGKDFYRLSGNVLSYTFQVKINNDFNYEFYNSTWSYVKHTSTEHTSSSRKRSFFRSSSSSSRSYTSHTNEIHKGKSYQLLVVENTVEVAQFINNNPEFLQLAEPFWKELSHLPSLYDYSAYRRLIDQYGTHYLQSGSLGGEYRVLFYVDSEKLKQNDFNSVEEKKCKSSGWHFVVKFSSHGCKELENALKAASGTQNNVLRGEPFIRGGGAGFISGLSYLELDNPAGNKRRYSAWAESVTNLPQVIKQKLTPLYELVKEVPCASVKKLYLKWALEEYLDEFDPCHCRPCQNGGLATVEGTHCLCHCKPYTFGAACEQGVLVGNQAGGVDGGWSCWSSWSPCVQGKKTRSRECNNPPPSGGGRSCVGETTESTQCEDEELEHLRLLEPHCFPLSLVPTEFCPSPPALKDGFVQDEGTMFPVGKNVVYTCNEGYSLIGNPVARCGEDLRWLVGEMHCQKIACVLPVLMDGIQSHPQKPFYTVGEKVTVSCSGGMSLEGPSAFLCGSSLKWSPEMKNARCVQKENPLTQAVPKCQRWEKLQNSRCVCKMPYECGPSLDVCAQDERSKRILPLTVCKMHVLHCQGRNYTLTGRDSCTLPASAEKACGACPLWGKCDAESSKCVCREASECEEEGFSICVEVNGKEQTMSECEAGALRCRGQSISVTSIRPCAAETQ

SEQ ID NO: 157 - protein, 330 aa, Homo sapiens
MWLLVSVILISRISSVGGEATFCDFPKINHGILYDEEKYKPFSQVPTGEVFYYSCEYNFVSPSKSFWTRITCTEEGWSPTPKCLRLCFFPFVENGHSESSGQTHLEGDTVQIICNTGYRLQNNENNISCVERGWSTPPKCRSTDTSCVNPPTVQNAHILSRQMSKYPSGERVRYECRSPYEMFGDEEVMCLNGNWTEPPQCKDSTGKCGPPPPIDNGDITSFPLSVYAPASSVEYQCQNLYQLEGNKRITCRNGQWSEPPKCLHPCVISREIMENYNIALRWTAKQKLYLRTGESAEFVCKRGYRLSSRSHTLRTTCWDGKLEYPTCAKR

SEQ ID NO: 158 - protein, 583 aa, Homo sapiens
MKLLHVFLLFLCFHLRFCKVTYTSQEDLVEKKCLAKKYTHLSCDKVFCQPWQRCIEGTCVCKLPYQCPKNGTAVCATNRRSFPTYCQQKSLECLHPGTKFLNNGTCTAEGKFSVSLKHGNTDSEGIVEVKLVDQDKTMFICKSSWSMREANVACLDLGFQQGADTQRRFKLSDLSINSTECLHVHCRGLETSLAECTFTKRRTMGYQDFADVVCYTQKADSPMDDFFQCVNGKYISQMKACDGINDCGDQSDELCCKACQGKGFHCKSGVCIPSQYQCNGEVDCITGEDEVGCAGFASVTQEETEILTADMDAERRRIKSLLPKLSCGVKNRMHIRRKRIVGGKRAQLGDLPWQVAIKDASGITCGGIYIGGCWILTAAHCLRASKTHRYQIWTTVVDWIHPDLKRIVIEYVDRIIFHENYNAGTYQNDIALIEMKKDGNKKDCELPRSIPACVPWSPYLFQPNDTCIVSGWGREKDNERVFSLQWGEVKLISNCSKFYGNRFYEKEMECAGTYDGSIDACKGDSGGPLVCMDANNVTYVWGVVSWGENCGKPEFPGVYTKVANYFDWISYHVGRPFISQYNV

SEQ ID NO: 159 - protein, 81 aa, Homo sapiens
MNVDHEVNLLVEEIHRLGSKNADGKLSVKFGVLFRDDKCANLFEALVGTLKAAKRRKIVTYPGELLLQGVHDDVDIILLQD

SEQ ID NO: 160 - protein, 89 aa, Homo sapiens
MSSQQQKQPCTPPPQLQQQQVKQPCQPPPQEPCIPKTKEPCHPKVPEPCHPKVPEPCQPKVPEPCHPKVPEPCPSIVTPAPAQQKTKQK

SEQ ID NO: 161 - protein, 1230 aa, Homo sapiens
MASASYHISNLLEKMTSSDKDFRFMATNDLMTELQKDSIKLDDDSERKVVKMILKLLEDKNGEVQNLAVKCLGPLVSKVKEYQVETIVDTLCTNMLSDKEQLRDISSIGLKTVIGELPPASSGSALAANVCKKITGRLTSAIAKQEDVSVQLEALDIMADMLSRQGGLLVNFHPSILTCLLPQLTSPRLAVRKRTIIALGHLVMSCGNIVFVDLIEHLLSELSKNDSMSTTRTYIQCIAAISRQAGHRIGEYLEKIIPLVVKFCNVDDDELREYCIQAFESFVRRCPKEVYPHVSTIINICLKYLTYDPNYNYDDEDEDENAMDADGGDDDDQGSDDEYSDDDDMSWKVRRAAAKCLDAVVSTRHEMLPEFYKTVSPALISRFKEREENVKADVFHAYLSLLKQTRPVQSWLCDPDAMEQGETPLTMLQSQVPNIVKALHKQMKEKSVKTRQCCFNMLTELVNVLPGALTQHIPVLVPGIIFSLNDKSSSSNLKIDALSCLYVILCNHSPQVFHPHVQALVPPVVACVGDPFYKITSEALLVTQQLVKVIRPLDQPSSFDATPYIKDLFTCTIKRLKAADIDQEVKERAISCMGQIICNLGDNLGSDLPNTLQIFLERLKNEITRLTTVKALTLIAGSPLKIDLRPVLGEGVPILASFLRKNQRALKLGTLSALDILIKNYSDSLTAAMIDAVLDELPPLISESDMHVSQMAISFLTTLAKVYPSSLSKISGSILNELIGLVRSPLLQGGALSAMLDFFQALVVTGTNNLGYMDLLRMLTGPVYSQSTALTHKQSYYSIAKCVAALTRACPKEGPAVVGQFIQDVKNSRSTDSIRLLALLSLGEVGHHIDLSGQLELKSVILEAFSSPSEEVKSAASYALGSISVGNLPEYLPFVLQEITSQPKRQYLLLHSLKEIISSASVVGLKPYVENIWALLLKHCECAEEGTRNVVAECLGKLTLIDPETLLPRLKGYLISGSSYARSSVVTAVKFTISDHPQPIDPLLKNCIGDFLKTLEDPDLNVRRVALVTFNSAAHNKPSLIRDLLDTVLPHLYNETKVRKELIREVEMGPFKHTVDDGLDIRKAAFECMYTLLDSCLDRLDIFEFLNHVEDGLKDHYDIKMLTFLMLVRLSTLCPSAVLQRLDRLVEPLRATCTTKVKANSVKQEFEKQDELKRSAMRAVAALLTIPEAEKSPLMSEFQSQISSNPELAAIFESIQKDSSSTNLESMDTS

SEQ ID NO: 162 - protein, 146 aa, Homo sapiens
MAGPLRAPLLLLAILAVALAVSPAAGSSPGKPPRLVGGPMDASVEEEGVRRALDFAVGEYNKASNDMYHSRALQVVRARKQIVAGVNYFLDVELGRTTCTKTQPNLDNCPFHDQPHLKRKAFCSFQIYAVPWQGTMTLSKSTCQDA

SEQ ID NO: 163 - protein, 142 aa, Homo sapiens
MMWPMHTPLLLLTALMVAVAGSASAQSRTLAGGIHATDLNDKSVQCALDFAISEYNKVINKDEYYSRPLQVMAAYQQIVGGVNYYFNVKFGRTTCTKSQPNLDNCPFNDQPKLKEEEFCSFQINEVPWEDKISILNYKCRKV

SEQ ID NO: 164 - protein, 1036 aa, Homo sapiens
MYLVAGDRGLAGCGHLLVSLLGLLLLLARSGTRALVCLPCDESKCEEPRNCPGSIVQGVCGCCYTCASQRNESCGGTFGIYGTCDRGLRCVIRPPLNGDSLTEYEAGVCEDENWTDDQLLGFKPCNENLIAGCNIINGKCECNTIRTCSNPFEFPSQDMCLSALKRIEEEKPDCSKARCEVQFSPRCPEDSVLIEGYAPPGECCPLPSRCVCNPAGCLRKVCQPGNLNILVSKASGKPGECCDLYECKPVFGVDCRTVECPPVQQTACPPDSYETQVRLTADGCCTLPTRCECLSGLCGFPVCEVGSTPRIVSRGDGTPGKCCDVFECVNDTKPACVFNNVEYYDGDMFRMDNCRFCRCQGGVAICFTAQCGEINCERYYVPEGECCPVCEDPVYPFNNPAGCYANGLILAHGDRWREDDCTFCQCVNGERHCVATVCGQTCTNPVKVPGECCPVCEEPTIITVDPPACGELSNCTLTGKDCINGFKRDHNGCRTCQCINTEELCSERKQGCTLNCPFGFLTDAQNCEICECRPRPKKCRPIICDKYCPLGLLKNKHGCDICRCKKCPELSCSKICPLGFQQDSHGCLICKCREASASAGPPILSGTCLTVDGHHHKNEESWHDGCRECYCLNGREMCALITCPVPACGNPTIHPGQCCPSCADDFVVQKPELSTPSICHAPGGEYFVEGETWNIDSCTQCTCHSGRVLCETEVCPPLLCQNPSRTQDSCCPQCTDQPFRPSLSRNNSVPNYCKNDEGDIFLAAESWKPDVCTSCICIDSVISCFSESCPSVSCERPVLRKGQCCPYCIEDTIPKKVVCHFSGKAYADEERWDLDSCTHCYCLQGQTLCSTVSCPPLPCVEPINVEGSCCPMCPEMYVPEPTNIPIEKTNHRGEVDLEVPLWPTPSENDIVHLPRDMGHLQVDYRDNRLHPSEDSSLDSIASVVVPIIICLSIIIAFLFINQKKQWIPLLCWYRTPTKPSSLNNQLVSVDCKKGTRVQVDSSQRMLRIAEPDARFSGFYSMQKQNHLQADNFYQTV

SEQ ID NO: 165 - protein, 519 aa, Homo sapiens
MFLLPLPAAGRVVVRRLAVRRFGSRSLSTADMTKGLVLGIYSKEKEDDVPQFTSAGENFDKLLAGKLRETLNISGPPLKAGKTRTFYGLHQDFPSVVLVGLGKKAAGIDEQENWHEGKENIRAAVAAGCRQIQDLELSSVEVDPCGDAQAAAEGAVLGLYEYDDLKQKKKMAVSAKLYGSGDQEAWQKGVLFASGQNLARQLMETPANEMTPTRFAEIIEKNLKSASSKTEVHIRPKSWIEEQAMGSFLSVAKGSDEPPVFLEIHYKGSPNANEPPLVFVGKGITFDSGGISIKASANMDLMRADMGGAATICSAIVSAAKLNLPINIIGLAPLCENMPSGKANKPGDVVRAKNGKTIQVDNTDAEGRLILADALCYAHTFNPKVILNAATLTGAMDVALGSGATGVFTNSSWLWNKLFEASIETGDRVWRMPLFEHYTRQVVDCQLADVNNIGKYRSAGACTAAAFLKEFVTHPKWAHLDIAGVMTNKDEVPYLRKGMTGRPTRTLIEFLLRFSQDNA

SEQ ID NO: 166 - protein, 475 aa, Homo sapiens
MAALTTLFKYIDENQDRYIKKLAKWVAIQSVSAWPEKRGEIRRMMEVAAADVKQLGGSVELVDIGKQKLPDGSEIPLPPILLGRLGSDPQKKTVCIYGHLDVQPAALEDGWDSEPFTLVERDGKLYGRGSTDDKGPVAGWINALEAYQKTGQEIPVNVRFCLEGMEESGSEGLDELIFARKDTFFKDVDYVCISDNYWLGKKKPCITYGLRGICYFFIEVECSNKDLHSGVYGGSVHEAMTDLILLMGSLVDKRGNILIPGINEAVAAVTEEEHKLYDDIDFDIEEFAKDVGAQILLHSHKKDILMHRWRYPSLSLHGIEGAFSGSGAKTVIPRKVVGKFSIRLVPNMTPEVVGEQVTSYLTKKFAELRSPNEFKVYMGHGGKPWVSDFSHPHYLAGRRAMKTVFGVEPDLTREGGSIPVTLTFQEATGKNVMLLPVGSADDGAHSQNEKLNRYNYIEGTKMLAAYLYEVSQLKD

SEQ ID NO: 167 - protein, 533 aa, Homo sapiens
MAFANLRKVLISDSLDPCCRKILQDGGLQVVEKQNLSKEELIAELQDCEGLIVRSATKVTADVINAAEKLQVVGRAGTGVDNVDLEAATRKGILVMNTPNGNSLSAAELTCGMIMCLARQIPQATASMKDGKWERKKFMGTELNGKTLGILGLGRIGREVATRMQSFGMKTIGYDPIISPEVSASFGVQQLPLEEIWPLCDFITVHTPLLPSTTGLLNDNTFAQCKKGVRVVNCARGGIVDEGALLRALQSGQCAGAALDVFTEEPPRDRALVDHENVISCPHLGASTKEAQSRCGEEIAVQFVDMVKGKSLTGVVNAQALTSAFSPHTKPWIGLAEALGTLMRAWAGSPKGTIQVITQGTSLKNAGNCLSPAVIVGLLKEASKQADVNLVNAKLLVKEAGLNVTTSHSPAAPGEQGFGECLLAVALAGAPYQAVGLVQGTTPVLQGLNGAVFRPEVPLRRDLPLLLFRTQTSDPAMLPTMIGLLAEAGVRLLSYQTSLVSDGETWHVMGISSLLPSLEAWKQHVTEAFQFHF

SEQ ID NO: 168 - protein, 118 aa, Homo sapiens
MPFLELDTNLPANRVPAGLEKRLCAAAASILGKPADRVNVTVRPGLAMALSGSTEPCAQLSISSIGVVGTAEDNRSHSAHFFEFLTKELALGQDRILIRFFPLESWQIGKIGTVMTFL

SEQ ID NO: 169 - protein, 2413 aa, Homo sapiens
MGISTVILEMCLLWGQVLSTGGWIPRTTDYASLIPSEVPLDPTVAEGSPFPSESTLESTVAEGSPISLESTLESTVAEGSLIPSESTLESTVAEGSDSGLALRLVNGDGRCQGRVEILYRGSWGTVCDDSWDTNDANVVCRQLGCGWAMSAPGNAWFGQGSGPIALDDVRCSGHESYLWSCPHNGWLSHNCGHGEDAGVICSAAQPQSTLRPESWPVRISPPVPTEGSESSLALRLVNGGDRCRGRVEVLYRGSWGTVCDDYWDTNDANVVCRQLGCGWAMSAPGNAQFGQGSGPIVLDDVRCSGHESYLWSCPHNGWLTHNCGHSEDAGVICSAPQSRPTPSPDTWPTSHASTAGPESSLALRLVNGGDRCQGRVEVLYRGSWGTVCDDSWDTSDANVVCRQLGCGWATSAPGNARFGQGSGPIVLDDVRCSGYESYLWSCPHNGWLSHNCQHSEDAGVICSAAHSWSTPSPDTLPTITLPASTVGSESSLALRLVNGGDRCQGRVEVLYRGSWGTVCDDSWDTNDANVVCRQLGCGWAMLAPGNARFGQGSGPIVLDDVRCSGNESYLWSCPHNGWLSHNCGHSEDAGVICSGPESSLALRLVNGGDRCQGRVEVLYRGSWGTVCDDSWDTNDANVVCRQLGCGWATSAPGNARFGQGSGPIVLDDVRCSGHESYLWSCPNNGWLSHNCGHHEDAGVICSAAQSRSTPRPDTLSTITLPPSTVGSESSLTLRLVNGSDRCQGRVEVLYRGSWGTVCDDSWDTNDANVVCRQLGCGWATSAPGNARFGQGSGPIVLDDVRCSGHESYLWSCPHNGWLSHNCGHHEDAGVICSVSQSRPTPSPDTWPTSHASTAGPESSLALRLVNGGDRCQGRVEVLYRGSWGTVCDDSWDTSDANVVCRQLGCGWATSAPGNARFGQGSGPIVLDDVRCSGYESYLWSCPHNGWLSHNCQHSEDAGVICSAAHSWSTPSPDTLPTITLPASTVGSESSLALRLVNGGDRCQGRVEVLYQGSWGTVCDDSWDTNDANVVCRQLGCGWAMSAPGNARFGQGSGPIVLDDVRCSGHESYLWSCPHNGWLSHNCGHSEDAGVICSASQSRPTPSPDTWPTSHASTAGSESSLALRLVNGGDRCQGRVEVLYRGSWGTVCDDYWDTNDANVVCRQLGCGWAMSAPGNARFGQGSGPIVLDDVRCSGHESYLWSCPHNGWLSHNCGHHEDAGVICSASQSQPTPSPDTWPTSHASTAGSESSLALRLVNGGDRCQGRVEVLYRGSWGTVCDDYWDTNDANVVCRQLGCGWATSAPGNARFGQGSGPIVLDDVRCSGHESYLWSCPHNGWLSHNCGHHEDAGVICSASQSQPTPSPDTWPTSHASTAGSESSLALRLVNGGDRCQGRVEVLYRGSWGTVCDDYWDTNDANVVCRQLGCGWATSAPGNARFGQGSGPIVLDDVRCSGHESYLWSCPHNGWLSHNCGHHEDAGVICSASQSQPTPSPDTWPTSRASTAGSESTLALRLVNGGDRCRGRVEVLYQGSWGTVCDDYWDTNDANVVCRQLGCGWAMSAPGNAQFGQGSGPIVLDDVRCSGHESYLWSCPHNGWLSHNCGHHEDAGVICSAAQSQSTPRPDTWLTTNLPALTVGSESSLALRLVNGGDRCRGRVEVLYRGSWGTVCDDSWDTNDANVVCRQLGCGWAMSAPGNARFGQGSGPIVLDDVRCSGNESYLWSCPHKGWLTHNCGHHEDAGVICSATQINSTTTDWWHPTTTTTARPSSNCGGFLFYASGTFSSPSYPAYYPNNAKCVWEIEVNSGYRINLGFSNLKLEAHHNCSFDYVEIFDGSLNSSLLLGKICNDTRQIFTSSYNRMTIHFRSDISFQNTGFLAWYNSFPSDATLRLVNLNSSYGLCAGRVEIYHGGTWGTVCDDSWTIQEAEVVCRQLGCGRAVSALGNAYFGSGSGPITLDDVECSGTESTLWQCRNRGWFSHNCNHREDAGVICSGNHLSTPAPFLNITRPNTDYSCGGFLSQPSGDFSSPFYPGNYPNNAKCVWDIEVQNNYRVTVIFRDVQLEGGCNYDYIEVFDGPYRSSPLIARVCDGARGSFTSSSNFMSIRFISDHSITRRGFRAEYYSSPSNDSTNLLCLPNHMQASVSRSYLQSLGFSASDLVISTWNGYYECRPQITPNLVIFTIPYSGCGTFKQADNDTIDYSNFLTAAVSGGIIKRRTDLRIHVSCRMLQNTWVDTMYIANDTIHVANNTIQVEEVQYGNFDVNISFYTSSSFLYPVTSRPYYVDLNQDLYVQAEILHSDAVLTLFVDTCVASPYSNDFTSLTYDLIRSGCVRDDTYGPYSSPSLRIARFRFRAFHFLNRFPSVYLRCKMVVCRAYDPSSRCYRGCVLRSKRDVGSYQEKVDVVLGPIQLQTPPRREEEPR

SEQ ID NO: 170 - protein, 110 aa, Homo sapiens
MRFMTLLFLTALAGALVCAYDPEAASAPGSGNPCHEASAAQKENAGEDPGLARQAPKPRKQRSSLLEKGLDGAKKAVGGLGKLGKDAVEDLESVGKGAVHDVKDVLDSVL

SEQ ID NO: 171 - protein, 165 aa, Homo sapiens
MASGVQVADEVCRIFYDMKVRKCSTPEEIKKRKKAVIFCLSADKKCIIVEEGKEILVGDVGVTITDPFKHFVGMLPEKDCRYALYDASFETKESRKEELMFFLWAPELAPLKSKMIYASSKDAIKKKFQGIKHECQANGPEDLNRACIAEKLGGSLIVAFEGCPV

SEQ ID NO: 172 - protein, 244 aa, Homo sapiens
MAAAAAAGEARRVLVYGGRGALGSRCVQAFRARNWWVASVDVVENEEASASIIVKMTDSFTEQADQVTAEVGKLLGEEKVDAILCVAGGWAGGNAKSKSLFKNCDLMWKQSIWTSTISSHLATKHLKEGGLLTLAGAKAALDGTPGMIGYGMAKGAVHQLCQSLAGKNSGMPPGAAAIAVLPVTLDTPMNRKSMPEADFSSWTPLEFLVETFHDWITGKNRPSSGSLIQVVTTEGRTELTPAYF

SEQ ID NO: 173 - protein, 463 aa, Homo sapiens
MGAGPSLLLAALLLLLSGDGAVRCDTPANCTYLDLLGTWVFQVGSSGSQRDVNCSVMGPQEKKVVVYLQKLDTAYDDLGNSGHFTIIYNQGFEIVLNDYKWFAFFKYKEEGSKVTTYCNETMTGWVHDVLGRNWACFTGKKVGTASENVYVNIAHLKNSQEKYSNRLYKYDHNFVKAINAIQKSWTATTYMEYETLTLGDMIRRSGGHSRKIPRPKPAPLTAEIQQKILHLPTSWDWRNVHGINFVSPVRNQASCGSCYSFASMGMLEARIRILTNNSQTPILSPQEVVSCSQYAQGCEGGFPYLIAGKYAQDFGLVEEACFPYTGTDSPCKMKEDCFRYYSSEYHYVGGFYGGCNEALMKLELVHHGPMAVAFEVYDDFLHYKKGIYHHTGLRDPFNPFELTNHAVLLVGYGTDSASGMDYWIVKNSWGTGWGENGYFRIRRGTDECAIESIAVAATPIPKL

SEQ ID NO: 174 - protein, 199 aa, Homo sapiens
MEASPASGPRHLMDPHIFTSNFNNGIGRHKTYLCYEVERLDNGTSVKMDQHRGFLHNQAKNLLCGFYGRHAELRFLDLVPSLQLDPAQIYRVTWFISWSPCFSWGCAGEVRAFLQENTHVRLRIFAARIYDYDPLYKEALQMLRDAGAQVSIMTYDEFKHCWDTFVDHQGCPFQPWDGLDEHSQALSGRLRAILQNQGN

SEQ ID NO: 175 - protein, 430 aa, Homo sapiens
MAANLSRNGPALQEAYVRVVTEKSPTDWALFTYEGNSNDIRVAGTGEGGLEEMVEELNSGKVMYAFCRVKDPNSGLPKFVLINWTGEGVNDVRKGACASHVSTMASFLKGAHVTINARAEEDVEPECIMEKVAKASGANYSFHKESGRFQDVGPQAPVGSVYQKTNAVSEIKRVGKDSFWAKAEKEEENRRLEEKRRAEEAQRQLEQERRERELREAARREQRYQEQGGEASPQRTWEQQQEVVSRNRNEQESAVHPREIFKQKERAMSTTSISSPQPGKLRSPFLQKQLTQPETHFGREPAAAISRPRADLPAEEPAPSTPPCLVQAEEEAVYEEPPEQETFYEQPPLVQQQGAGSEHIDHHIQGQGLSGQGLCARALYDYQAADDTEISFDPENLITGIEVIDEGWWRGYGPDGHFGMFPANYVELIE

SEQ ID NO: 176 - protein, 815 aa, Homo sapiens
MEDGFSSYSSLYDTSSLLQFCNDDSASAASSMEVTDRIASLEQRVQMQEDDIQLLKSALADVVRRLNITEEQQAVLNRKGPTKARPLMQTLPLRTTVNNGTVLPKKPTGSLPSPSGVRKETAVPATKSNIKRTSSSERVSPGGRRESNGDSRGNRNRTGSTSSSSSGKKNSESKPKEPVFSAEEGYVKMFLRGRPVTMYMPKDQVDSYSLEAKVELPTKRLKLEWVYGYRGRDCRNNLYLLPTGETVYFIASVVVLYNVEEQLQRHYAGHNDDVKCLAVHPDRITIATGQVAGTSKDGKQLPPHVRIWDSVTLNTLHVIGIGFFDRAVTCIAFSKSNGGTNLCAVDDSNDHVLSVWDWQKEEKLADVKCSNEAVFAADFHPTDTNIIVTCGKSHLYFWTLEGSSLNKKQGLFEKQEKPKFVLCVTFSENGDTITGDSSGNILVWGKGTNRISYAVQGAHEGGIFALCMLRDGTLVSGGGKDRKLISWSGNYQKLRKTEIPEQFGPIRTVAEGKGDVILIGTTRNFVLQGTLSGDFTPITQGHTDELWGLAIHASKSQFLTCGHDKHATLWDAVGHRPVWDKIIEDPAQSSGFHPSGSVVAVGTLTGRWFVFDTETKDLVTVHTDGNEQLSVMRYSPDGNFLAIGSHDNCIYIYGVSDNGRKYTRVGKCSGHSSFITHLDWSVNSQFLVSNSGDYEILYWVPSACKQVVSVETTRDIEWATYTCTLGFHVFGVWPEGSDGTDINAVCRAHEKKLLSTGDDFGKVHLFSYPCSQFRAPSHIYGGHSSHVTNVDFLCEDSHLISTGGKDTSIMQWRVI

SEQ ID NO: 177 - protein, 240 aa, Homo sapiens
MATDELATKLSRRLQMEGEGGGETPEQPGLNGAAAAAAGAPDEAAEALGSADCELSAKLLRRADLNQGIGEPQSPSRRVFNPYTEFKEFSRKQIKDMEKMFKQYDAGRDGFIDLMELKLMMEKLGAPQTHLGLKNMIKEVDEDFDSKLSFREFLLIFRKAAAGELQEDSGLCVLARLSEIDVSSEGVKGAKSFFEAKVQAINVSSRFEEEIKAEQEERKKQAEEMKQRKAAFKELQSTFK

SEQ ID NO: 178 - protein, 462 aa, Homo sapiens
MGKEKTHINIVVIGHVDSGKSTTTGHLIYKCGGIDKRTIEKFEKEAAEMGKGSFKYAWVLDKLKAERERGITIDISLWKFETSKYYVTIIDAPGHRDFIKNMITGTSQADCAVLIVAAGVGEFEAGISKNGQTREHALLAYTLGVKQLIVGVNKMDSTEPPYSQKRYEEIVKEVSTYIKKIGYNPDTVAFVPISGWNGDNMLEPSANMPWFKGWKVTRKDGNASGTTLLEALDCILPPTRPTDKPLRLPLQDVYKIGGIGTVPVGRVETGVLKPGMVVTFAPVNVTTEVKSVEMHHEALSEALPGDNVGFNVKNVSVKDVRRGNVAGDSKNDPPMEAAGFTAQVIILNHPGQISAGYAPVLDCHTAHIACKFAELKEKIDRRSGKKLEDGPKFLKSGDAAIVDMVPGKPMCVESFSDYPPLGRFAVRDMRQTVAVGVIKAVDKKAAGAGKVTKSAQKAQKAK

SEQ ID NO: 179 - protein, 225 aa, Homo sapiens
MGFGDLKSPAGLQVLNDYLADKSYIEGYVPSQADVAVFEAVSSPPPADLCHALRWYNHIKSYEKEKASLPGVKKALGKYGPADVEDTTGSGATDSKDDDDIDLFGSDDEEESEEAKRLREERLAQYESKKAKKPALVAKSSILLDVKPWDDETDMAKLEECVRSIQADGLVWGSSKLVPVGYGIKKLQIQCVVEDDKVGTDMLEEQITAFEDYVQSMDVAAFNKI

SEQ ID NO: 180 - protein, 437 aa, Homo sapiens
MAAGTLYTYPENWRAFKALIAAQYSGAQVRVLSAPPHFHFGQTNRTPEFLRKFPAGKVPAFEGDDGFCVFESNAIAYYVSNEELRGSTPEAAAQVVQWVSFADSDIVPPASTWVFPTLGIMHHNKQATENAKEEVRRILGLLDAYLKTRTFLVGERVTLADITVVCTLLWLYKQVLEPSFRQAFPNTNRWFLTCINQPQFRAVLGEVKLCEKMAQFDAKKFAETQPKKDTPRKEKGSREEKQKPQAERKEEKKAAAPAPEEEMDECEQALAAEPKAKDPFAHLPKSTFVLDEFKRKYSNEDTLSVALPYFWEHFDKDGWSLWYSEYRFPEELTQTFMSCNLITGMFQRLDKLRKNAFASVILFGTNNSSSISGVWVFRGQELAFPLSPDWQVDYESYTWRKLDPGSEETQTLVREYFSWEGAFQHVGKAFNQGKIFK

SEQ ID NO: 181 - protein, 858 aa, Homo sapiens
MVNFTVDQIRAIMDKKANIRNMSVIAHVDHGKSTLTDSLVCKAGIIASARAGETRFTDTRKDEQERCITIKSTAISLFYELSENDLNFIKQSKDGAGFLINLIDSPGHVDFSSEVTAALRVTDGALVVVDCVSGVCVQTETVLRQAIAERIKPVLMMNKMDRALLELQLEPEELYQTFQRIVENVNVIISTYGEGESGPMGNIMIDPVLGTVGFGSGLHGWAFTLKQFAEMYVAKFAAKGEGQLGPAERAKKVEDMMKKLWGDRYFDPANGKFSKSATSPEGKKLPRTFCQLILDPIFKVFDAIMNFKKEETAKLIEKLDIKLDSEDKDKEGKPLLKAVMRRWLPAGDALLQMITIHLPSPVTAQKYRCELLYEGPPDDEAAMGIKSCDPKGPLMMYISKMVPTSDKGRFYAFGRVFSGLVSTGLKVRIMGPNYTPGKKEDLYLKPIQRTILMMGRYVEPIEDVPCGNIVGLVGVDQFLVKTGTITTFEHAHNMRVMKFSVSPVVRVAVEAKNPADLPKLVEGLKRLAKSDPMVQCIIEESGEHIIAGAGELHLEICLKDLEEDHACIPIKKSDPVVSYRETVSEESNVLCLSKSPNKHNRLYMKARPFPDGLAEDIDKGEVSARQELKQRARYLAEKYEWDVAEARKIWCFGPDGTGPNILTDITKGVQYLNEIKDSVVAGFQWATKEGALCEENMRGVRFDVHDVTLHADAIHRGGGQIIPTARRCLYASVLTAQPRLMEPIYLVEIQCPEQVVGGIYGVLNRKRGHVFEESQVAGTPMFVVKAYLPVNESFGFTADLRSNTGGQAFPQCVFDHWQILPGDPFDNSSRPSQVVAETRKRKGLKEGIPALDNFLDKL

SEQ ID NO: 182 - protein, 261 aa, Homo sapiens
MAAAVPRAAFLSPLLPLLLGFLLLSAPHGGSGLHTKGALPLDTVTFYKVIPKSKFVLVKFDTQYPYGEKQDEFKRLAENSASSDDLLVAEVGISDYGDKLNMELSEKYKLDKESYPVFYLFRDGDFENPVPYTGAVKVGAIQRWLKGQGVYLGMPGCLPVYDALAGEFIRASGVEARQALLKQGQDNLSSVKETQKKWAEQYLKIMGKILDQGEDFPASEMTRIARLIEKNKMSDGKKEELQKSLNILTAFQKKGAEKEEL

SEQ ID NO: 183 - protein, 723 aa, Homo sapiens
MSTATGPEAAPKPSAKSIYEQRKRYSTVVMADVSQYPVNHLVTFCLGEDDGVHTVEDASRKLAVMDSQGRVWAQEMLLRVSPDHVTLLDPASKEELESYPLGAIVRCDAVMPPGRSRSLLLLVCQEPERAQPDVHFFQGLRLGAELIREDIQGALHNYRSGRGERRAAALRATQEELQRDRSPAAETPPLQRRPSVRAVISTVERGAGRGRPQAKPIPEAEEAQRPEPVGTSSNADSASPDLGPRGPDLAVLQAEREVDILNHVFDDVESFVSRLQKSAEAARVLEHRERGRRSRRRAAGEGLLTLRAKPPSEAEYTDVLQKIKYAFSLLARLRGNIADPSSPELLHFLFGPLQMIVNTSGGPEFASSVRRPHLTSDAVALLRDNVTPRENELWTSLGDSWTRPGLELSPEEGPPYRPEFFSGWEPPVTDPQSRAWEDPVEKQLQHERRRRQQSAPQVAVNGHRDLEPESEPQLESETAGKWVLCNYDFQARNSSELSVKQRDVLEVLDDSRKWWKVRDPAGQEGYVPYNILTPYPGPRLHHSQSPARSLNSTPPPPPAPAPAPPPALARPRWDRPRWDSCDSLNGLDPSEKEKFSQMLIVNEELQARLAQGRSGPSRAVPGPRAPEPQLSPGSDASEVRAWLQAKGFSSGTVDALGVLTGAQLFSLQKEELRAVSPEEGARVYSQVTVQRSLLEDKEKVSELEAVMEKQKKKVEGEVEMEVI

SEQ ID NO: 184 - protein, 468 aa, Homo sapiens
MGRGWGFLFGLLGAVWLLSSGHGEEQPPETAAQRCFCQVSGYLDDCTCDVETIDRFNNYRLFPRLQKLLESDYFRYYKVNLKRPCPFWNDISQCGRRDCAVKPCQSDEVPDGIKSASYKYSEEANNLIEECEQAERLGAVDESLSEETQKAVLQWTKHDDSSDNFCEADDIQSPEAEYVDLLLNPERYTGYKGPDAWKIWNVIYEENCFKPQTIKRPLNPLASGQGTSEENTFYSWLEGLCVEKRAFYRLISGLHASINVHLSARYLLQETWLEKKWGHNITEFQQRFDGILTEGEGPRRLKNLYFLYLIELRALSKVLPFFERPDFQLFTGNKIQDEENKMLLLEILHEIKSFPLHFDENSFFAGDKKEAHKLKEDFRLHFRNISRIMDCVGCFKCRLWGKLQTQGLGTALKILFSEKLIANMPESGPSYEFHLTRQEIVSLFNAFGRISTSVKELENFRNLLQNIH

SEQ ID NO: 185 - protein, 315 aa, Homo sapiens
MACAEFSFHVPSLEELAGVMQKGLKDNFADVQVSVVDCPDLTKEPFTFPVKGICGKTRIAEVGGVPYLLPLVNQKKVYDLNKIAKEIKLPGAFILGAGAGPFQTLGFNSEFMPVIQTESEHKPPVNGSYFAHVNPADGGCLLEKYSEKCHDFQCALLANLFASEGQPGKVIEVKAKRRTGPLNFVTCMRETLEKHYGNKPIGMGGTFIIQKGKVKSHIMPAEFSSCPLNSDEEVNKWLHFYEMKAPLVCLPVFVSRDPGFDLRLEHTHFFSRHGEGGHYHYDTTPDIVEYLGYFLPAEFLYRIDQPKETHSIGRD

SEQ ID NO: 186 - protein, 362 aa, Homo sapiens
MSGGSADYNREHGGPEGMDPDGVIESNWNEIVDNFDDMNLKESLLRGIYAYGFEKPSAIQQRAIIPCIKGYDVIAQAQSGTGKTATFAISILQQLEIEFKETQALVLAPTRELAQQIQKVILALGDYMGATCHACIGGTNVRNEMQKLQAEAPHIVVGTPGRVFDMLNRRYLSPKWIKMFVLDEADEMLSRGFKDQIYEIFQKLNTSIQVVLLSATMPTDVLEVTKKFMRDPIRILVKKEELTLEGIKQFYINVEREEWKLDTLCDLYETLTITQAVIFLNTRRKVDWLTEKMHARDFTVSALHGDMDQKERDVIMREFRSGSSRVLITTDLLARGIDVQQVSLVINYDLPTNRENYIHRSR

SEQ ID NO: 187 - protein, 248 aa, Homo sapiens
MADFDTYDDRAYSSFGGGRGSRGSAGGHGSRSQKELPTEPPYTAYVGNLPFNTVQGDIDAIFKDLSIRSVRLVRDKDTDKFKGFCYVEFDEVDSLKEALTYDGALLGDRSLRVDIAEGRKQDKGGFGFRKGGPDDRGMGSSRESRGGWDSRDDFNSGFRDDFLGGRGGSRPGDRRTGPPMGSRFRDGPPLRGSNMDFREPTEEERAQRPRLQLKPRTVATPLNQVANPNSAIFGGARPREEVVQKEQE

SEQ ID NO: 188 - protein, 245 aa, Homo sapiens
MAVRASFENNCEIGCFAKLTNTYCLVAIGGSENFYSVFEGELSDTIPVVHASIAGCRIIGRMCVGNRHGLLVPNNTTDQELQHIRNSLPDTVQIRRVEERLSALGNVTTCNDYVALVHPDLDRETEEILADVLKVEVFRQTVADQVLVGSYCVFSNQGGLVHPKTSIEDQDELSSLLQVPLVAGTVNRGSEVIAAGMVVNDWCAFCGLDTTSTELSVVESVFKLNEAQPSTIATSMRDSLIDSLT

SEQ ID NO: 189 - protein, 286 aa, Homo sapiens
MADFDDRVSDEEKVRIAAKFITHAPPGEFNEVFNDVRLLLNNDNLLREGAAHAFAQYNMDQFTPVKIEGYEDQVLITEHGDLGNSRFLDPRNKISFKFDHLRKEASDPQPEEADGGLKSWRESCDSALRAYVKDHYSNGFCTVYAKTIDGQQTIIACIESHQFQPKNFWNGRWRSEWKFTITPPTAQVVGVLKIQVHYYEDGNVQLVSHKDVQDSLTVSNEAQTAKEFIKIIENAENEYQTAISENYQTMSDTTFKALRRQLPVTRTKIDWNKILSYKIGKEMQNA

SEQ ID NO: 190 - protein, 286 aa, Homo sapiens
MADLEEQLSDEEKVRIAAKFIIHAPPGEFNEVFNDVRLLLNNDNLLREGAAHAFAQYNLDQFTPVKIEGYEDQVLITEHGDLGNGKFLDPKNRICFKFDHLRKEATDPRPCEVENAVESWRTSVETALRAYVKEHYPNGVCTVYGKKIDGQQTIIACIESHQFQAKNFWNGRWRSEWKFTITPSTTQVVGILKIQVHYYEDGNVQLVSHKDIQDSLTVSNEVQTAKEFIKIVEAAENEYQTAISENYQTMSDTTFKALRRQLPVTRTKIDWNKILSYKIGKEMQNA

SEQ ID NO: 191 - protein, 419 aa, Homo sapiens
MPLSRWLRSVGVFLLPAPYWAPRERWLGSLRRPSLVHGYPVLAWHSARCWCQAWTEEPRALCSSLRMNGDQNSDVYAQEKQDFVQHFSQIVRVLTEDEMGHPEIGDAIARLKEVLEYNAIGGKYNRGLTVVVAFRELVEPRKQDADSLQRAWTVGWCVELLQAFFLVADDIMDSSLTRRGQICWYQKPGVGLDAINDANLLEACIYRLLKLYCREQPYYLNLIELFLQSSYQTEIGQTLDLLTAPQGNVDLVRFTEKRYKSIVKYKTAFYSFYLPIAAAMYMAGIDGEKEHANAKKILLEMGEFFQIQDDYLDLFGDPSVTGKIGTDIQDNKCSWLVVQCLQRATPEQYQILKENYGQKEAEKVARVKALYEELDLPAVFLQYEEDSYSHIMALIEQYAAPLPPAVFLGLARKIYKRRK

SEQ ID NO: 192 - protein, 135 aa, Homo sapiens
MATVQQLEGRWRLVDSKGFDEYMKELGVGIALRKMGAMAKPDCIITCDGKNLTIKTESTLKTTQFSCTLGEKFEETTADGRKTQTVCNFTDGALVQHQEWDGKESTITRKLKDGKLVVECVMNNVTCTRIYEKVE

SEQ ID NO: 193 - protein, 866 aa, Homo sapiens
MFSMRIVCLVLSVVGTAWTADSGEGDFLAEGGGVRGPRVVERHQSACKDSDWPFCSDEDWNYKCPSGCRMKGLIDEVNQDFTNRINKLKNSLFEYQKNNKDSHSLTTNIMEILRGDFSSANNRDNTYNRVSEDLRSRIEVLKRKVIEKVQHIQLLQKNVRAQLVDMKRLEVDIDIKIRSCRGSCSRALAREVDLKDYEDQQKQLEQVIAKDLLPSRDRQHLPLIKMKPVPDLVPGNFKSQLQKVPPEWKALTDMPQMRMELERPGGNEITRGGSTSYGTGSETESPRNPSSAGSWNSGSSGPGSTGNRNPGSSGTGGTATWKPGSSGPGSTGSWNSGSSGTGSTGNQNPGSPRPGSTGTWNPGSSERGSAGHWTSESSVSGSTGQWHSESGSFRPDSPGSGNARPNNPDWGTFEEVSGNVSPGTRREYHTEKLVTSKGDKELRTGKEKVTSGSTTTTRRSCSKTVTKTVIGPDGHKEVTKEVVTSEDGSDCPEAMDLGTLSGIGTLDGFRHRHPDEAAFFDTASTGKTFPGFFSPMLGEFVSETESRGSESGIFTNTKESSSHHPGIAEFPSRGKSSSYSKQFTSSTSYNRGDSTFESKSYKMADEAGSEADHEGTHSTKRGHAKSRPVRDCDDVLQTHPSGTQSGIFNIKLPGSSKIFSVYCDQETSLGGWLLIQQRMDGSLNFNRTWQDYKRGFGSLNDEGEGEFWLGNDYLHLLTQRGSVLRVELEDWAGNEAYAEYHFRVGSEAEGYALQVSSYEGTAGDALIEGSVEEGAEYTSHNNMQFSTFDRDADQWEENCAEVYGGGWWYNNCQAANLNGIYYPGGSYDPRNNSPYEIENGVVWVSFRGADYSLRAVRMKIRPLVTQ

SEQ ID NO: 194 - protein, 491 aa, Homo sapiens
MKRMVSWSFHKLKTMKHLLLLLLCVFLVKSQGVNDNEEGFFSARGHRPLDKKREEAPSLRPAPPPISGGGYRARPAKAAATQKKVERKAPDAGGCLHADPDLGVLCPTGCQLQEALLQQERPIRNSVDELNNNVEAVSQTSSSSFQYMYLLKDLWQKRQKQVKDNENVVNEYSSELEKHQLYIDETVNSNIPTNLRVLRSILENLRSKIQKLESDVSAQMEYCRTPCTVSCNIPVVSGKECEEIIRKGGETSEMYLIQPDSSVKPYRVYCDMNTENGGWTVIQNRQDGSVDFGRKWDPYKQGFGNVATNTDGKNYCGLPGEYWLGNDKISQLTRMGPTELLIEMEDWKGDKVKAHYGGFTVQNEANKYQISVNKYRGTAGNALMDGASQLMGENRTMTIHNGMFFSTYDRDNDGWLTSDPRKQCSKEDGGGWWYNRCHAANPNGRYYWGGQYTWDMAKHGTDDGVVWMNWKGSWYSMRKMSMKIRPFFPQQ

SEQ ID NO: 195 - protein, 453 aa, Homo sapiens
MSWSLHPRNLILYFYALLFLSSTCVAYVATRDNCCILDERFGSYCPTTCGIADFLSTYQTKVDKDLQSLEDILHQVENKTSEVKQLIKAIQLTYNPDESSKPNMIDAATLKSRKMLEEIMKYEASILTHDSSIRYLQEIYNSNNQKIVNLKEKVAQLEAQCQEPCKDTVQIHDITGKDCQDIANKGAKQSGLYFIKPLKANQQFLVYCEIDGSGNGWTVFQKRLDGSVDFKKNWIQYKEGFGHLSPTGTTEFWLGNEKIHLISTQSAIPYALRVELEDWNGRTSTADYAMFKVGPEADKYRLTYAYFAGGDAGDAFDGFDFGDDPSDKFFTSHNGMQFSTWDNDNDKFEGNCAEQDGSGWWMNKCHAGHLNGVYYQGGTYSKASTPNGYDNGIIWATWKTRWYSMKKTTMKIIPFNRLTIGEGQQHHLGGAKQVRPEHPAETEYDSLYPEDDL

SEQ ID NO: 196 - protein, 2602 aa, Homo sapiens
MPVTEKDLAEDAPWKKIQQNTFTRWCNEHLKCVNKRIGNLQTDLSDGLRLIALLEVLSQKRMYRKYHQRPTFRQMQLENVSVALEFLDRESIKLVSIDSKAIVDGNLKLILGLVWTLILHYSISMPVWEDEGDDDAKKQTPKQRLLGWIQNKIPYLPITNFNQNWQDGKALGALVDSCAPGLCPDWESWDPQKPVDNAREAMQQADDWLGVPQVITPEEIIHPDVDEHSVMTYLSQFPKAKLKPGAPLKPKLNPKKARAYGRGIEPTGNMVKQPAKFTVDTISAGQGDVMVFVEDPEGNKEEAQVTPDSDKNKTYSVEYLPKVTGLHKVTVLFAGQHISKSPFEVSVDKAQGDASKVTAKGPGLEAVGNIANKPTYFDIYTAGAGVGDIGVEVEDPQGKNTVELLVEDKGNQVYRCVYKPMQPGPHVVKIFFAGDTIPKSPFVVQVGEACNPNACRASGRGLQPKGVRIRETTDFKVDTKAAGSGELGVTMKGPKGLEELVKQKDFLDGVYAFEYYPSTPGRYSIAITWGGHHIPKSPFEVQVGPEAGMQKVRAWGPGLHGGIVGRSADFVVESIGSEVGSLGFAIEGPSQAKIEYNDQNDGSCDVKYWPKEPGEYAVHIMCDDEDIKDSPYMAFIHPATGGYNPDLVRAYGPGLEKSGCIVNNLAEFTVDPKDAGKAPLKIFAQDGEGQRIDIQMKNRMDGTYACSYTPVKAIKHTIAVVWGGVNIPHSPYRVNIGQGSHPQKVKVFGPGVERSGLKANEPTHFTVDCTEAGEGDVSVGIKCDARVLSEDEEDVDFDIIHNANDTFTVKYVPPAAGRYTIKVLFASQEIPASPFRVKVDPSHDASKVKAEGPGLSKAGVENGKPTHFTVYTKGAGKAPLNVQFNSPLPGDAVKDLDIIDNYDYSHTVKYTPTQQGNMQVLVTYGGDPIPKSPFTVGVAAPLDLSKIKLNGLENRVEVGKDQEFTVDTRGAGGQGKLDVTILSPSRKVVPCLVTPVTGRENSTAKFIPREEGLYAVDVTYDGHPVPGSPYTVEASLPPDPSKVKAHGPGLEGGLVGKPAEFTIDTKGAGTGGLGLTVEGPCEAKIECSDNGDGTCSVSYLPTKPGEYFVNILFEEVHIPGSPFKADIEMPFDPSKVVASGPGLEHGKVGEAGLLSVDCSEAGPGALGLEAVSDSGTKAEVSIQNNKDGTYAVTYVPLTAGMYTLTMKYGGELVPHFPARVKVEPAVDTSRIKVFGPGIEGKDVFREATTDFTVDSRPLTQVGGDHIKAHIANPSGASTECFVTDNADGTYQVEYTPFEKGLHVVEVTYDDVPIPNSPFKVAVTEGCQPSRVQAQGPGLKEAFTNKPNVFTVVTRGAGIGGLGITVEGPSESKINCRDNKDGSCSAEYIPFAPGDYDVNITYGGAHIPGSPFRVPVKDVVDPSKVKIAGPGLGSGVRARVLQSFTVDSSKAGLAPLEVRVLGPRGLVEPVNVVDNGDGTHTVTYTPSQEGPYMVSVKYADEEIPRSPFKVKVLPTYDASKVTASGPGLSSYGVPASLPVDFAIDARDAGEGLLAVQITDQEGKPKRAIVHDNKDGTYAVTYIPDKTGRYMIGVTYGGDDIPLSPYRIRATQTGDASKCLATGPGIASTVKTGEEVGFVVDAKTAGKGKVTCTVLTPDGTEAEADVIENEDGTYDIFYTAAKPGTYVIYVRFGGVDIPNSPFTVMATDGEVTAVEEAPVNACPPGFRPWVTEEAYVPVSDMNGLGFKPFDLVIPFAVRKGEITGEVHMPSGKTATPEIVDNKDGTVTVRYAPTEVGLHEMHIKYMGSHIPESPLQFYVNYPNSGSVSAYGPGLVYGVANKTATFTIVTEDAGEGGLDLAIEGPSKAEISCIDNKDGTCTVTYLPTLPGDYSILVKYNDKHIPGSPFTAKITDDSRRCSQVKLGSAADFLLDISETDLSSLTASIKAPSGRDEPCLLKRLPNNHIGISFIPREVGEHLVSIKKNGNHVANSPVSIMVVQSEIGDARRAKVYGRGLSEGRTFEMSDFIVDTRDAGYGGISLAVEGPSKVDIQTEDLEDGTCKVSYFPTVPGVYIVSTKFADEHVPGSPFTVKISGEGRVKESITRTSRAPSVATVGSICDLNLKIPEINSSDMSAHVTSPSGRVTEAEIVPMGKNSHCVRFVPQEMGVHTVSVKYRGQHVTGSPFQFTVGPLGEGGAHKVRAGGPGLERGEAGVPAEFSIWTREAGAGGLSIAVEGPSKAEITFDDHKNGSCGVSYIAQEPGNYEVSIKFNDEHIPESPYLVPVIAPSDDARRLTVMSLQESGLKVNQPASFAIRLNGAKGKIDAKVHSPSGAVEECHVSELEPDKYAVRFIPHENGVHTIDVKFNGSHVVGSPFKVRVGEPGQAGNPALVSAYGTGLEGGTTGIQSEFFINTTRAGPGTLSVTIEGPSKVKMDCQETPEGYKVMYTPMAPGNYLISVKYGGPNHIVGSPFKAKVTGQRLVSPGSANETSSILVESVTRSSTETCYSAIPKASSDASKVTSKGAGLSKAFVGQKSSFLVDCSKAGSNMLLIGVHGPTTPCEEVSMKHVGNQQYNVTYVVKERGDYVLAVKWGEEHIPGSPFHVTVP

SEQ ID NO: 197 - protein, 338 aa, Homo sapiens [sequence omitted]

SEQ ID NO: 198 - protein, 250 aa, Homo sapiens [sequence omitted]

SEQ ID NO: 199 - protein, 321 aa, Homo sapiens
MGEPQGSMRILVTGGSGLVGKAIQKVVADGAGLPGEDWVFVSSKDADLTDTAQTRALFEKVQPTHVIHLAAMVGGLFRNIKYNLDFWRKNVHMNDNVLHSAFEVGARKVVSCLSTCIFPDKTTYPIDETMIHNGPPHNSNFGYSYAKRMIDVQNRAYFQQYGCTFTAVIPTNVFGPHDNFNIEDGHVLPGLIHKVHLAKSSGSALTVWGTGNPRRQFIYSLDLAQLFIWVLREYNEVEPIILSVGEEDEVSIKEAAEAVVEAMDFHGEVTFDTTKSDGQFKKTASNSKLRTYLPDFRFTPFKQAVKETCAWFTDNYEQARK

SEQ ID NO: 200 - protein, 782 aa, Homo sapiens
MAPHRPAPALLCALSLALCALSLPVRAATASRGASQAGAPQGRVPEARPNSMVVEHPEFLKAGKEPGLQIWRVEKFDLVPVPTNLYGDFFTGDAYVILKTVQLRNGNLQYDLHYWLGNECSQDESGAAAIFTVQLDDYLNGRAVQHREVQGFESATFLGYFKSGLKYKKGGVASGFKHVVPNEVVVQRLFQVKGRRVVRATEVPVSWESFNNGDCFILDLGNNIHQWCGSNSNRYERLKATQVSKGIRDNERSGRARVHVSEEGTEPEAMLQVLGPKPALPAGTEDTAKEDAANRKLAKLYKVSNGAGTMSVSLVADENPFAQGALKSEDCFILDHGKDGKIFVWKGKQANTEERKAALKTASDFITKMDYPKQTQVSVLPEGGETPLFKQFFKNWRDPDQTDGLGLSYLSSHIANVERVPFDAATLHTSTAMAAQHGMDDDGTGQKQIWRIEGSNKVPVDPATYGQFYGGDSYIILYNYRHGGRQGQIIYNWQGAQSTQDEVAASAILTAQLDEELGGTPVQSRVVQGKEPAHLMSLFGGKPMIIYKGGTSREGGQTAPASTRLFQVRANSAGATRAVEVLPKAGALNSNDAFVLKTPSAAYLWVGTGASEAEKTGAQELLRVLRAQPVQVAEGSEPDGFWEALGGKAAYRTSPRLKDKKMDAHPPRLFACSNKIGRFVIEEVPGELMQEDLATDDVMLLDTWDQVFVWVGKDSQEEEKTEALTSAKRYIETDPANRDRRTPITVVKQGFEPPSFVGWFLGWDDDYWSVDPLDRAMAELAA

SEQ ID NO: 201 - protein, 515 aa, Homo sapiens [sequence omitted]

SEQ ID NO: 202 - protein, 558 aa, Homo sapiens
MAALTRDPQFQKLQQWYREHRSELNLRRLFDANKDRFNHFSLTLNTNHGHILVDYSKNLVTEDVMRMLVDLAKSRGVEAARERMFNGEKINYTEGRAVLHVALRNRSNTPILVDGKDVMPEVNKVLDKMKSFCQRVRSGDWKGYTGKTITDVINIGIGGSDLGPLMVTEALKPYSSGGPRVWYVSNIDGTHIAKTLAQLNPESSLFIIASKTFTTQETITNAETAKEWFLQAAKDPSAVAKHFVALSTNTTKVKEFGIDPQNMFEFWDWVGGRYSLWSAIGLSIALHVGFDNFEQLLSGAHWMDQHFRTTPLEKNAPVLLALLGIWYINCFGCETHAMLPYDQYLHRFAAYFQQGDMESNGKYITKSGTRVDHQTGPIVWGEPGTNGQHAFYQLIHQGTKMIPCDFLIPVQTQHPIRKGLHHKILLANFLAQTEALMRGKSTEEARKELQAAGKSPEDLERLLPHKVFEGNRPTNSIVFTKLTPFMLGALVAMYEHKIFVQGIIWDINSFDQWGVELGKQLAKKIEPELDGSAQVTSHDASTNGLINFIKQQREARVQ

SEQ ID NO: 203 - protein, 373 aa, Homo sapiens; identical to SEQ ID NO: 37

SEQ ID NO: 204 - protein, 106 aa, Homo sapiens
MAQEFVNCKIQPGKVVVFIKPTCPYCRRAQEILSQLPIKQGLLEFVDITATNHTNEIQDYLQQLTGARTVPRVFIGKDCIGGCSDLVSLQQSGELLTRLKQIGALQ

SEQ ID NO: 205 - protein, 222 aa, Homo sapiens
MAGKPKLHYFNGRGRMEPIRWLLAAAGVEFEEKFIGSAEDLGKLRNDGSLMFQQVPMVEIDGMKLVQTRAILNYIASKYNLYGKDIKERALIDMYTEGMADLNEMILLLPLCRPEEKDAKIALIKEKTKSRYFPAFEKVLQSHGQDYLVGNKLSRADISLVELLYYVEELDSSLISNFPLLKALKTRISNLPTVKKFLQPGSPRKPPADAKALEEARKIFRF

SEQ ID NO: 206 - protein, 408 aa, Homo sapiens
MSKRDIVLTNVTVVQLLRQPCPVTRAPPPPEPKAEVEPQPQPEPTPVREEIKPPPPPLPPHPATPPPKMVSVARELTVGINGFGRIGRLVLRACMEKGVKVVAVNDPFIDPEYMVYMFKYDSTHGRYKGSVEFRNGQLVVDNHEISVYQCKEPKQIPWRAVGSPYVVESTGVYLSIQAASDHISAGAQRVVISAPSPDAPMFVMGVNENDYNPGSMNIVSNASCTTNCLAPLAKVIHERFGIVEGLMTTVHSYTATQKTVDGPSRKAWRDGRGAHQNIIPASTGAAKAVTKVIPELKGKLTGMAFRVPTPDVSVVDLTCRLAQPAPYSAIKEAVKAAAKGPMAGILAYTEDEVVSTDFLGDTHSSIFDAKAGIALNDNFVKLISWYDNEYGYSHRVVDLLRYMFSRDK

SEQ ID NO: 207 - protein, 313 aa, Homo sapiens
MAARRALHFVFKVGNRFQTARFYRDVLGMKVESCSVARLECSGAISAHCSDYTRITEDSFSKPYDGKWSKTMVGFGPEDDHFVAELTYNYGVGDYKLGNDFMGITLASSQAVSNARKLEWPLTEVAEGVFETEAPGGYKFYLQNRSLPQSDPVLKVTLAVSDLQKSLNYWCNLLGMKIYEKDEEKQRALLGYADNQCKLELQGVKGGVDHAAAFGRIAFSCPQKELPDLEDLMKRENQKILTPLVSLDTPGKATVQVVILADPDGHEICFVGDEAFRELSKMDPEGSKLLDDAMAADKSDEWFAKHNKPKASG

SEQ ID NO: 208 - protein, 345 aa, Homo sapiens
MPRIDADLKLDFKDVLLRPKRSSLKSRAEVDLERTFTFRNSKQTYSGIPIIVANMDTVGTFEMAAVMSQHSMFTAIHKHYSLDDWKLFATNHPECLQNVAVSSGSGQNDLEKMTSILEAVPQVKFICLDVANGYSEHFVEFVKLVRAKFPEHTIMAGNVVTGEMVEELILSGADIIKVGVGPGSVCTTRTKTGVGYPQLSAVIECADSAHGLKGHIISDGGCTCPGDVAKAFGAGADFVMLGGMFSGHTECAGEVFERNGRKLKLFYGMSSDTAMNKHAGGVAEYRASEGKTVEVPYKGDVENTILDILGGLRSTCTYVGAAKLKELSRRATFIRVTQQHNTVFS

SEQ ID NO: 209 - protein, 400 aa, Homo sapiens
MMGLGNGRRSMKSPPLVLAALVACIIVLGFNYWIASSRSVDLQTRIMELEGRVRRAAAERGAVELKKNEFQGELEKQREQLDKIQSSHNFQLESVNKLYQDEKAVLVNNITTGERLIRVLQDQLKTLQRNYGRLQQDVLQFQKNQTNLERKFSYDLSQCINQMKEVKEQCEERIEEVTKKGNEAVASRDLSENNDQRQQLQALSEPQPRLQAAGLPHTEVPQGKGNVLGNSKSQTPAPSSEVVLDSKRQVEKEETNEIQVVNEEPQRDRLPQEPGREQVVEDRPVGGRGFGGAGELGQTPQVQAALSVSQENPEMEGPERDQLVIPDGQEEEQEAAGEGRNQQKLRGEDDYNMDENEAESETDKQAALAGNDRNIDVFNVEDQKRDTINLLDQREKRNHT

SEQ ID NO: 210 - protein, 84 aa, Homo sapiens
MPYLLISTQIRMEVGPTMVGDEQSDPELMQHLGASKRRALGNNFYEYYVDDPPRIVLDKLERRGFRVLSMTGVGQTLVWCLHKE

SEQ ID NO: 211 - protein, 216 aa, Homo sapiens
MAAQGEPQVQFKLVLVGDGGTGKTTFVKRHLTGEFEKKYVATLGVEVHPLVFHTNRGPIKFNVWDTAGQEKFGGLRDGYYIQAQCAIIMFDVTSRVTYKNVPNWHRDLVRVCENIPIVLCGNKVDIKDRKVKAKSIVFHRKKNLQYYDISAKSNYNFEKPFLWLARKLIGDPNLEFVAMPALAPPEVVMDPALAAQYEHDLEVAQTTALPDEDDDL

SEQ ID NO: 212 - protein, 840 aa, Homo sapiens
MSVVGIDLGFQSCYVAVARAGGIETIANEYSDRCTPACISFGPKNRSIGAAAKSQVISNAKNTVQGFKRFHGRAFSDPFVEAEKSNLAYDIVQLPTGLTGIKVTYMEEERNFTTEQVTAMLLSKLKETAESVLKKPVVDCVVSVPCFYTDAERRSVMDATQIAGLNCLRLMNETTAVALAYGIYKQDLPALEEKPRNVVFVDMGHSAYQVSVCAFNRGKLKVLATAFDTTLGGRKFDEVLVNHFCEEFGKKYKLDIKSKIRALLRLSQECEKLKKLMSANASDLPLSIECFMNDVDVSGTMNRGKFLEMCNDLLARVEPPLRSVLEQTKLKKEDIYAVEIVGGATRIPAVKEKISKFFGKELSTTLNADEAVTRGCALQCAILSPAFKVREFSITDVVPYPISLRWNSPAEEGSSDCEVFSKNHAAPFSKVLTFYRKEPFTLEAYYSSPQDLPYPDPAIAQFSVQKVTPQSDGSSSKVKVKVRVNVHGIFSVSSASLVEVHKSEENEEPMETDQNAKEEEKMQVDQEEPHVEEQQQQTPAENKAESEEMETSQAGSKDKKMDQPPQAKKAKVKTSTVDLPIENQLLWQIDREMLNLYIENEGKMIMQDKLEKERNDAKNAVEEYVYEMRDKLSGEYEKFVSEDDRNSFTLKLEDTENWLYEDGEDQPKQVYVDKLAELKNLGQPIKIRFQESEERPKLFEELGKQIQQYMKIISSFKNKEDQYDHLDAADMTKVEKSTNEAMEWMNNKLNLQNKQSLTMDPVVKSKEIEAKIKELTSTCSPIISKPKPKVEPPKEEQKNAEQNGPVDGQGDNPGPQAAEQGTDTAVPSDSDKKLPEMDID

SEQ ID NO: 213 - protein, 646 aa, Homo sapiens
MSKGPAVGIDLGTTYSCVGVFQHGKVEIIANDQGNRTTPSYVAFTDTERLIGDAAKNQVAMNPTNTVFDAKRLIGRRFDDAVVQSDMKHWPFMVVNDAGRPKVQVEYKGETKSFYPEEVSSMVLTKMKEIAEAYLGKTVTNAVVTVPAYFNDSQRQATKDAGTIAGLNVLRIINEPTAAAIAYGLDKKVGAERNVLIFDLGGGTFDVSILTIEDGIFEVKSTAGDTHLGGEDFDNRMVNHFIAEFKRKHKKDISENKRAVRRLRTACERAKRTLSSSTQASIEIDSLYEGIDFYTSITRARFEELNADLFRGTLDPVEKALRDAKLDKSQIHDIVLVGGSTRIPKIQKLLQDFFNGKELNKSINPDEAVAYGAAVQAAILSGDKSENVQDLLLLDVTPLSLGIETAGGVMTVLIKRNTTIPTKQTQTFTTYSDNQPGVLIQVYEGERAMTKDNNLLGKFELTGIPPAPRGVPQIEVTFDIDANGILNVSAVDKSTGKENKITITNDKGRLSKEDIERMVQEAEKYKAEDEKQRDKVSSKNSLESYAFNMKATVEDEKLQGKINDEDKQKILDKCNEIINWLDKNQTAEKEEFEHQQKELEKVCNPIITKLYQSAGGMPGGMPGGFPGGGAPPSGGASSGPTIEEVD

SEQ ID NO: 214 - protein, 205 aa, Homo sapiens
MAEPLQPDPGAAEDAAAQAVETPGWKAPEDAGPQPGSYEIRHYGPAKWVSTSVESMDWDSAIQTGFTKLNSYIQGKNEKEMKIKMTAPVTSYVEPGSGPFSESTITISLYIPSEQQFDPPRPLESDVFIEDRAEMTVFVRSFDGFSSAQKNQEQLLTLASILREDGKVFDEKVYYTAGYNSPVKLLNRNNEVWLIQKNEPTKENE

SEQ ID NO: 215 - protein, 142 aa, Homo sapiens
MVLSPADKTNVKAAWGKVGAHAGEYGAEALERMFLSFPTTKTYFPHFDLSHGSAQVKGHGKKVADALTNAVAHVDDMPNALSALSDLHAHKLRVDPVNFKLLSHCLLVTLAAHLPAEFTPAVHASLDKFLASVSTVLTSKYR

SEQ ID NO: 216 - protein, 147 aa, Homo sapiens
MVHLTPEEKSAVTALWGKVNVDEVGGEALGRLLVVYPWTQRFFESFGDLSTPDAVMGNPKVKAHGKKVLGAFSDGLAHLDNLKGTFATLSELHCDKLHVDPENFRLLGNVLVCVLAHHFGKEFTPPVQAAYQKVVAGVANALAHKYH

SEQ ID NO: 217 - protein, 355 aa, Homo sapiens
MSEEQFGGDGAAAAATAAVGGSAGEQEGAMVAATQGAAAAAGSGAGTGGGTASGGTEGGSAESEGAKIDASKNEEDEGHSNSSPRHSEAATAQREEWKMFIGGLSWDTTKKDLKDYFSKFGEVVDCTLKLDPITGRSRGFGFVLFKESESVDKVMDQKEHKLNGKVIDPKRAKAMKTKEPVKKIFVGGLSPDTPEEKIREYFGGFGEVESIELPMDNKTNKRRGFCFITFKEEEPVKKIMEKKYHNVGLSKCEIKVAMSKEQYQQQQQWGSRGGFAGRARGRGGGPSQNWNQGYSNYWNQGYGNYGYNSQGYGGYGGYDYTGYNNYYGYGDYSNQQSGYGKVSRRGGHQNSYKPY

SEQ ID NO: 218 - protein, 463 aa, Homo sapiens
METEQPEETFPNTETNGEFGKRPAEDMEEEQAFKRSRNTDEMVELRILLQSKNAGAVIGKGGKNIKALRTDYNASVSVPDSSGPERILSISADIETIGEILKKIIPTLEEGLQLPSPTATSQLPLESDAVECLNYQHYKGSDFDCELRLLIHQSLAGGIIGVKGAKIKELRENTQTTIKLFQECCPHSTDRVVLIGGKPDRVVECIKIILDLISESPIKGRAQPYDPNFYDETYDYGGFTMMFDDRRGRPVGFPMRGRGGFDRMPPGRGGRPMPPSRRDYDDMSPRRGPPPPPPGRGGRGGSRARNLPLPPPPPPRGGDLMAYDRRGRPGDRYDGMVGFSADETWDSAIDTWSPSEWQMAYEPQGGSGYDYSYAGGRGSYGDLGGPIITTQVTIPKDLAGSIIGKGGQRIKQIRHESGASIKIDEPLEGSEDRIITITGTQDQIQNAQYLLQNSVKQYSGKFF

SEQ ID NO: 219 - protein, 730 aa, Homo sapiens
MAAGVEAAAEVAATEIKMEEESGAPGVPSGNGAPGPKGEGERPAQNEKRKEKNIKRGGNRFEPYANPTKRYRAFITNIPFDVKWQSLKDLVKEKVGEVTYVELLMDAEGKSRGCAVVEFKMEESMKKAAEVLNKHSLSGRPLKVKEDPDGEHARRAMQKVMATTGGMGMGPGGPGMITIPPSILNNPNIPNEIIHALQAGRLGSTVFVANLDYKVGWKKLKEVFSMAGVVVRADILEDKDGKSRGIGTVTFEQSIEAVQAISMFNGQLLFDRPMHVKMDERALPKGDFFPPERPQQLPHGLGGIGMGLGPGGQPIDANHLNKGIGMGNIGPAGMGMEGIGFGINKMGGMEGPFGGGMENMGRFGSGMNMGRINEILSNALKRGEIIAKQGGGGGGGSVPGIERMGPGIDRLGGAGMERMGAGLGHGMDRVGSEIERMGLVMDRMGSVERMGSGIERMGPLGLDHMASSIERMGQTMERIGSGVERMGAGMGFGLERMAAPIDRVGQTIERMGSGVERMGPAIERMGLSMERMVPAGMGAGLERMGPVMDRMATGLERMGANNLERMGLERMGANSLERMGLERMGANSLERMGPAMGPALGAGIERMGLAMGGGGGASFDRAIEMERGNFGGSFAGSFGGAGGHAPGVARKACQIFVRNLPFDFTWKMLKDKFNECGHVLYADIKMENGKSKGCGVVKFESPEVAERACRMMNGMKLSGREIDVRIDRNA

SEQ ID NO: 220 - protein, 353 aa, Homo sapiens
MEKTLETVPLERKKREKEQFRKLFIGGLSFETTEESLRNYYEQWGKLTDCVVMRDPASKRSRGFGFVTFSSMAEVDAAMAARPHSIDGRVVEPKRAVAREESGKPGAHVTVKKLFVGGIKEDTEEHHLRDYFEEYGKIDTIEIITDRQSGKKRGFGFVTFDDHDPVDKIVLQKYHTINGHNAEVRKALSRQEMQEVQSSRSGRGGNFGFGDSRGGGGNFGPGPGSNFRGGSDGYGSGRGFGDGYNGYGGGPGGGNFGGSPGYGGGRGGYGGGGPGYGNQGGGYGGGYDNYGGGNYGSGNYNDFGNYNQQPSNYGPMKSGNFGGSRNMGGPYGGGNYGPGGSGGSGGYGGRSRY

SEQ ID NO: 221 - protein, 215 aa, Homo sapiens
MGKGDPKKPRGKMSSYAFFVQTCREEHKKKHPDASVNFSEFSKKCSERWKTMSAKEKGKFEDMAKADKARYEREMKTYIPPKGETKKKFKDPNAPKRPPSAFFLFCSEYRPKIKGEHPGLSIGDVAKKLGEMWNNTAADDKQPYEKKAAKLKEKYEKDIAAYRAKGKPDAAKKGVVKAEKSKKKKEEEDDEEDEEDEEEEEEEEDEDEEEDDDDE

SEQ ID NO: 222 - protein, 525 aa, Homo sapiens
MKALIAALLLITLQYSCAVSPTDCSAVEPEAEKALDLINKRRRDGYLFQLLRIADAHLDRVENTTVYYLVLDVQESDCSVLSRKYWNDCEPPDSRRPSEIVIGQCKVIATRHSHESQDLRVIDFNCTTSSVSSALANTKDSPVLIDFFEDTERYRKQANKALEKYKEENDDFASFRVDRIERVARVRGGEGTGYFVDFSVRNCPRHHFPRHPNVFGFCRADLFYDVEALDLESPKNLVINCEVFDPQEHENINGVPPHLGHPFHWGGHERSSTTKPPFKPHGSRDHHHPHKPHEHGPPPPPDERDHSHGPPLPQGPPPLLPMSCSSCQHATFGTNGAQRHSHNNNSSDLHPHKHHSHEQHPHGHHPHAHHPHEHDTHRQHPHGHHPHGHHPHGHHPHGHHPHGHHPHCHDFQDYGPCDPPPHNQGHCCHGHGPPPGHLRRRGPGKGPRPFHCRQIGSVYRLPPLRKGEVLPLPEANFPSFPLPHHKHPLKPDNQPFPQSVSESCPGKFKSGFPQVSMFFTHTFPK

SEQ ID NO: 223 - protein, 130 aa, Homo sapiens
MSGRGKQGGKARAKAKTRSSRAGLQFPVGRVHRLLRKGNYSERVGAGAPVYLAAVLEYLTAEILELAGNAARDNKKTRIIPRHLQLAIRNDEELNKLLGKVTIAQGGVLPNIQAVLLPKKTESHHKAKGK

SEQ ID NO: 224 - protein, 226 aa, Homo sapiens
MSETAPAETATPAPVEKSPAKKKATKKAAGAGAAKRKATGPPVSELITKAVAASKERNGLSLAALKKALAAGGYDVEKNNSRIKLGLKSLVSKGTLVQTKGTGASGSFKLNKKAASGEAKPKAKKAGAAKAKKPAGATPKKAKKAAGAKKAVKKTPKKAKKPAAAGVKKVAKSPKKAKAAAKPKKATKSPAKPKAVKPKAAKPKAAKPKAAKPKAAKAKKAAAKKK

SEQ ID NO: 225 - protein, 362 aa, Homo sapiens [sequence omitted]

SEQ ID NO: 226 - protein, 378 aa, Homo sapiens
MVDYSVWDHIEVSDDEDETHPNIDTASLFRWRHQARVERMEQFQKEKEELDRGCRECKRKVAECQRKLKELEVAEGGKAELERLQAEAQQLRKEERSWEQKLEEMRKKEKSMPWNVDTLSKDGFSKSMVNTKPEKTEEDSEEVREQKHKTFVEKYEKQIKHFGMLRRWDDSQKYLSDNVHLVCEETANYLVIWCIDLEVEEKCALMEQVAHQTIVMQFILELAKSLKVDPRACFRQFFTKIKTADRQYMEGFNDELEAFKERVRGRAKLRIEKAMKEYEEEERKKRLGPGGLDPVEVYESLPEELQKCFDVKDVQMLQDAISKMDPTDAKYHMQRCIDSGLWVPNSKASEAKEGEEAGPGDPLLEAVPKTGDEKDVSV

SEQ ID NO: 227 - protein, 384 aa, Homo sapiens
APTKAPDVFPIISGCRHPKDNSPVVLACLITGYHPTSVTVTWYMGTQSQPQRTFPEIQRRDSYYMTSSQLSTPLQQWRQGEYKCVVQHTASKSKKEIFRWPESPKAQASSVPTAQPQAEGSLAKATTAPATTRNTGRGGEEKKKEKEKEEQEERETKTPECPSHTQPLGVYLLTPAVQDLWLRDKATFTCFVVGSDLKDAHLTWEVAGKVPTGGVEEGLLERHSNGSQSQHSRLTLPRSLWNAGTSVTCTLNHPSLPPQRLMALREPAAQAPVKLSLNLLASSDPPEAASWLLCEVSGFSPPNILLMWLEDQREVNTSGFAPARPPPQPRSTTFWAWSVLRVPAPPSPQPATYTCVVSHEDSRTLLNASRSLEVSYVTDHGPMK

SEQ ID NO: 228 - protein, 428 aa, Homo sapiens
ASTQSPSVFPLTRCCKNIPSNATSVTLGCLATGYFPEPVMVTWDTGSLNGTTMTLPATTLTLSGHYATISLLTVSGAWAKQMFTCRVAHTPSSTDWVDNKTFSVCSRDFTPPTVKILQSSCDGGGHFPPTIQLLCLVSGYTPGTINITWLEDGQVMDVDLSTASTTQEGELASTQSELTLSQKHWLSDRTYTCQVTYQGHTFEDSTKKCADSNPRGVSAYLSRPSPFDLFIRKSPTITCLVVDLAPSKGTVNLTWSRASGKPVNHSTRKEEKQRNGTLTVTSTLPVGTRDWIEGETYQCRVTHPHLPRALMRSTTKTSGPRAAPEVYAFATPEWPGSRDKRTLACLIQNFMPEDISVQWLHNEVQLPDARHSTTQPRKTKGSGFFVFSRLEVTRAEWEQKDEFICRAVHEAASPSQTVQRAVSVNPGK

SEQ ID NO: 229 - protein, 327 aa, Homo sapiens
ASTKGPSVFPLAPCSRSTSESTAALGCLVKDYFPEPVTVSWNSGALTSGVHTFPAVLQSSGLYSLSSVVTVPSSSLGTKTYTCNVDHKPSNTKVDKRVESKYGPPCPSCPAPEFLGGPSVFLFPPKPKDTLMISRTPEVTCVVVDVSQEDPEVQFNWYVDGVEVHNAKTKPREEQFNSTYRVVSVLTVLHQDWLNGKEYKCKVSNKGLPSSIEKTISKAKGQPREPQVYTLPPSQEEMTKNQVSLTCLVKGFYPSDIAVEWESNGQPENNYKTTPPVLDSDGSFFLYSRLTVDKSRWQEGNVFSCSVMHEALHNHYTQKSLSLSLGK

SEQ ID NO: 230 - protein, 117 aa, Homo sapiens
MDMRVLAQLLGLLLLCFPGARCDIQMTQSPSSLSASVGDRVTITCRASQGISNYLAWFQQKPGKAPKSLIYAASSLQSGVPSKFSGSGSGTDFTLTISSLQPEDFATYYCQQYNSYP

SEQ ID NO: 231 - protein, 121 aa, Homo sapiens
MVLQTQVFISLLLWISGAYGDIVMTQSPDSLAVSLGERATINCKSSQSVLYSSNNKNYLAWYQQKPGQPPKLLIYWASTRESGVPDRFSGSGSGTDFTLTISSLQAEDVAVYYCQQYYSTP

SEQ ID NO: 232 - protein, 117 aa, Homo sapiens
MAGFPLLLTLLTHCAGSWAQSVLTQPPSASGTPGQRVTISCSGSSSNIGSNYVYWYQQLPGTAPKLLIYSNNQRPSGVPDRFSGSKSGTSASLAISGLRSEDEADYYCAAWDDSLSG

SEQ ID NO: 233 - protein, 453 aa, Homo sapiens
GSASAPTLFPLVSCENSPSDTSSVAVGCLAQDFLPDSITFSWKYKNNSDISSTRGFPSVLRGGKYAATSQVLLPSKDVMQGTDEHVVCKVQHPNGNKEKNVPLPVIAELPPKVSVFVPPRDGFFGNPRKSKLICQATGFSPRQIQVSWLREGKQVGSGVTTDQVQAEAKESGPTTYKVTSTLTIKESDWLGQSMFTCRVDHRGLTFQQNASSMCVPDQDTAIRVFAIPPSFASIFLTKSTKLTCLVTDLTTYDSVTISWTRQNGEAVKTHTNISESHPNATFSAVGEASICEDDWNSGERFTCTVTHTDLPSPLKQTISRPKGVALHRPDVYLLPPAREQLNLRESATITCLVTGFSPADVFVQWMQRGQPLSPEKYVTSAPMPEPQAPGRYFAHSILTVSEEEWNTGETYTCVVAHEALPNRVTERTVDKSTGKPTLYNVSLVMSDTAGTCY

SEQ ID NO: 234 - protein, 159 aa, Homo sapiens
MKNHLLFWGVLAVFIKAVHVKAQEDERIVLVDNKCKCARITSRIIRSSEDPNEDIVERNIRIIVPLNNRENISDPTSPLRTRFVYHLSDLCKKCDPTEVELDNQIVTATQSNICDEDSATETCYTYDRNKCYTAVVPLVYGGETKMVETALTPDACYPD

SEQ ID NO: 235 - protein, 876 aa, Homo sapiens
MELITILEKTVSPDRLELEAAQKFLERAAVENLPTFLVELSRVLANPGNSQVARVAAGLQIKNSLTSKDPDIKAQYQQRWLAIDANARREVKNYVLQTLGTETYRPSSASQCVAGIACAEIPVNQWPELIPQLVANVTNPNSTEHMKESTLEAIGYICQDIDPEQLQDKSNEILTAIIQGMRKEEPSNNVKLAATNALLNSLEFTKANFDKESERHFIMQVVCEATQCPDTRVRVAALQNLVKIMSLYYQYMETYMGPALFAITIEAMKSDIDEVALQGIEFWSNVCDEEMDLAIEASEAAEQGRPPEHTSKFYAKGALQYLVPILTQTLTKQDENDDDDDWNPCKAAGVCLMLLATCCEDDIVPHVLPFIKEHIKNPDWRYRDAAVMAFGCILEGPEPSQLKPLVIQAMPTLIELMKDPSVVVRDTAAWTVGRICELLPEAAINDVYLAPLLQCLIEGLSAEPRVASNVCWAFSSLAEAAYEAADVADDQEEPATYCLSSSFELIVQKLLETTDRPDGHQNNLRSSAYESLMEIVKNSAKDCYPAVQKTTLVIMERLQQVLQMESHIQSTSDRIQFNDLQSLLCATLQNVLRKVQHQDALQISDVVMASLLRMFQSTAGSGGVQEDALMAVSTLVEVLGGEFLKYMEAFKPFLGIGLKNYAEYQVCLAAVGLVGDLCRALQSNIIPFCDEVMQLLLENLGNENVHRSVKPQILSVFGDIALAIGGEFKKYLEVVLNTLQQASQAQVDKSDYDMVDYLNELRESCLEAYTGIVQGLKGDQENVHPDVMLVQPRVEFILSFIDHIAGDEDHTDGVVACAAGLIGDLCTAFGKDVLKLVEARPMIHELLTEGRRSKTNKAKTLATWATKELRKLKNQA

SEQ ID NO: 236 - protein, 289 aa, Homo sapiens
MSGFSTEERAAPFSLEYRVFLKNEKGQYISPFHDIPIYADKDVFHMVVEVPRWSNAKMEIATKDPLNPIKQDVKKGKLRYVANLFPYKGYIWNYGAIPQTWEDPGHNDKHTGCCGDNDPIDVCEIGSKVCARGEIIGVKVLGILAMIDEGETDWKVIAINVDDPDAANYNDINDVKRLKPGYLEATVDWFRRYKVPDGKPENEFAFNAEFKDKDFAIDIIKSTHDHWKALVTKKTNGKGISCMNTTLSESPFKCDPDAARAIVDALPPPCESACTVPTDVDKWFHHQKN

SEQ ID NO: 237 - protein, 399 aa, Homo sapiens
MSDILRELLCVSEKAANIARACRQQEALFQLLIEEKKEGEKNKKFAVDFKTLADVLVQEVIKQNMENKFPGLEKNIFGEESNEFTNDWGEKITLRLCSTEEETAELLSKVLNGNKVASEALARVVHQDVAFTDPTLDSTEINVPQDILGIWVDPIDSTYQYIKGSADIKSNQGIFPCGLQCVTILIGVYDIQTGVPLMGVINQPFVSRDPNTLRWKGQCYWGLSYMGTNMHSLQLTISRRNGSETHTGNTGSEAAFSPSFSAVISTSEKETIKAALSRVCGDRIFGAAGAGYKSLCVVQGLVDIYIFSEDTTFKWDSCAAHAILRAMGGGIVDLKECLERNPETGLDLPQLVYHVENEGAAGVDRWANKGGLIAYRSRKRLETFLSLLVQNLAPAETHT

SEQ ID NO: 238 - protein, 605 aa, Homo sapiens
MALRKGGLALALLLLSWVALGPRSLEGADPGTPGEAEGPACPAACVCSYDDDADELSVFCSSRNLTRLPDGVPGGTQALWLDGNNLSSVPPAAFQNLSSLGFLNLQGGQLGSLEPQALLGLENLCHLHLERNQLRSLALGTFAHTPALASLGLSNNRLSRLEDGLFEGLGSLWDLNLGWNSLAVLPDAAFRGLGSLRELVLAGNRLAYLQPALFSGLAELRELDLSRNALRAIKANVFVQLPRLQKLYLDRNLIAAVAPGAFLGLKALRWLDLSHNRVAGLLEDTFPGLLGLRVLRLSHNAIASLRPRTFKDLHFLEELQLGHNRIRQLAERSFEGLGQLEVLTLDHNQLQEVKAGAFLGLTNVAVMNLSGNCLRNLPEQVFRGLGKLHSLHLEGSCLGRIRPHTFTGLSGLRRLFLKDNGLVGIEEQSLWGLAELLELDLTSNQLTHLPHRLFQGLGKLEYLLLSRNRLAELPADALGPLQRAFWLDVSHNRLEALPNSLLAPLGRLRYLSLRNNSLRTFTPQPPGLERLWLEGNPWDCGCPLKALRDFALQNPSAVPRFVQAICEGDDCQPPAYTYNNITCASPPEVVGLDLRDLSEAHFAPC

SEQ ID NO: 239 - protein, 177 aa, Homo sapiens
MEICRGLRSHLITLLLFLFHSETICRPSGRKSSKMQAFRIWDVNQKTFYLRNNQLVAGYLQGPNVNLEEKIDVVPIEPHALFLGIHGGKMCLSCVKSGDETRLQLEAVNITDLSENRKQDKRFAFIRSDSGPTTSFESAACPGWFLCTAMEADQPVSLTNMPDEGVMVTKFYFQEDE

SEQ ID NO: 240 - protein, 585 aa, Homo sapiens
MSQQHTLPVTLSPALSQELLKTVPPPVNTHQEQMKQPTPLPPPCQKVPVELPVEVPSKQEEKHMTAVKGLPEQECEQQQKEPQEQELQQQHWEQHEEYQKAENPEQQLKQEKTQRDQQLNKQLEEEKKLLDQQLDQELVKRDEQLGMKKEQLLELPEQQEGHLKHLEQQEGQLKHPEQQEGQLELPEQQEGQLELPEQQEGQLELPEQQEGQLELPEQQEGQLELPEQQEGQLELPQQQEGQLELSEQQEGQLELSEQQEGQLKHLEHQEGQLEVPEEQMGQLKYLEQQEGQLKHLDQQEKQPELPEQQMGQLKHLEQQEGQPKHLEQQEGQLEQLEEQEGQLKHLEQQEGQLEHLEHQEGQLGLPEQQVLQLKQLEKQQGQPKHLEEEEGQLKHLVQQEGQLKHLVQQEGQLEQQERQVEHLEQQVGQLKHLEEQEGQLKHLEQQQGQLEVPEQQVGQPKNLEQEEKQLELPEQQEGQVKHLEKQEAQLELPEQQVGQPKHLEQQEKHLEHPEQQDGQLKHLEQQEGQLKDLEQQKGQLEQPVFAPAPGQVQDIQPALPTKGEVLLPVEHQQQKQEVQWPPKHK

SEQ ID NO: 241 - protein, 414 aa, Homo sapiens
MSKKISGGSVVEMQGDEMTRIIWELIKEKLIFPYVELDLHSYDLGIENRDATNDQVTKDAAEAIKKHNVGVKCATITPDEKRVEEFKLKQMWKSPNGTIRNILGGTVFREAIICKNIPRLVSGWVKPIIIGRHAYGDQYRATDFVVPGPGKVEITYTPSDGTQKVTYLVHNFEEGGGVAMGMYNQDKSIEDFAHSSFQMALSKGWPLYLSTKNTILKKYDGRFKDIFQEIYDKQYKSQFEAQKIWYEHRLIDDMVAQAMKSEGGFIWACKNYDGDVQSDSVAQGYGSLGMMTSVLVCPDGKTVEAEAAHGTVTRHYRMYQKGQETSTNPIASIFAWTRGLAHRAKLDNNKELAFFANALEEVSIETIEAGFMTKDLAACIKGLPNVQRSDYLNTFEFMDKLGENLKIKLAQAKL

SEQ ID NO: 242 - protein, 930 aa, Homo sapiens
MKPPRPVRTCSKVLVLLSLLAIHQTTTAEKNGIDIYSLTVDSRVSSRFAHTVVTSRVVNRANTVQEATFQMELPKKAFITNFSMIIDGMTYPGIIKEKAEAQAQYSAAVAKGKSAGLVKATGRNMEQFQVSVSVAPNAKITFELVYEELLKRRLGVYELLLKVRPQQLVKHLQMDIHIFEPQGISFLETESTFMTNQLVDALTTWQNKTKAHIRFKPTLSQQQKSPEQQETVLDGNLIIRYDVDRAISGGSIQIENGYFVHYFAPEGLTTMPKNVVFVIDKSGSMSGRKIQQTREALIKILDDLSPRDQFNLIVFSTEATQWRPSLVPASAENVNKARSFAAGIQALGGTNINDAMLMAVQLLDSSNQEERLPEGSVSLIILLTDGDPTVGETNPRSIQNNVREAVSGRYSLFCLGFGFDVSYAFLEKLALDNGGLARRIHEDSDSALQLQDFYQEVANPLLTAVTFEYPSNAVEEVTQNNFRLLFKGSEMVVAGKLQDRGPDVLTATVSGKLPTQNITFQTESSVAEQEAEFQSPKYIFHNFMERLWAYLTIQQLLEQTVSASDADQQALRNQALNLSLAYSFVTPLTSMVVTKPDDQEQSQVAEKPMEGESRNRNVHSGSTFFKYYLQGAKIPKPEASFSPRRGWNRQAGAAGSRMNFRPGVLSSRQLGLPGPPDVPDHAAYHPFRRLAILPASAPPATSNPDPAVSRVMNMKIEETTMTTQTPAPIQAPSAILPLPGQSVERLCVDPRHRQGPVNLLSDPEQGVEVTGQYEREKAGFSWIEVTFKNPLVWVHASPEHVVVTRNRRSSAYKWKETLFSVMPGLKMTMDKTGLLLLSDPDKVTIGLLFWDGRGEGLRLLLRDTDRFSSHVGGTLGQFYQEVLWGSPAASDDGRRTLRVQGNDHSATRERRLDYQEGPPGVEISCWSVEL

SEQ ID NO: 243 - protein, 623 aa, Homo sapiens
MSCRQFSSSYLSRSGGGGGGGLGSGGSIRSSYSRFSSSGGGGGGGRFSSSSGYGGGSSRVCGRGGGGSFGYSYGGGSGGGFSASSLGGGFGGGSRGFGGASGGGYSSSGGFGGGFGGGSGGGFGGGYGSGFGGFGGFGGGAGGGDGGILTANEKSTMQELNSRLASYLDKVQALEEANNDLENKIQDWYDKKGPAAIQKNYSPYYNTIDDLKDQIVDLTVGNNKTLLDIDNTRMTLDDFRIKFEMEQNLRQGVDADINGLRQVLDNLTMEKSDLEMQYETLQEELMALKKNHKEEMSQLTGQNSGDVNVEINVAPGKDLTKTLNDMRQEYEQLIAKNRKDIENQYETQITQIEHEVSSSGQEVQSSAKEVTQLRHGVQELEIELQSQLSKKAALEKSLEDTKNRYCGQLQMIQEQISNLEAQITDVRQEIECQNQEYSLLLSIKMRLEKEIETYHNLLEGGQEDFESSGAGKIGLGGRGGSGGSYGRGSRGGSGGSYGGGGSGGGYGGGSGSRGGSGGSYGGGSGSGGGSGGGYGGGSGGGHSGGSGGGHSGGSGGNYGGGSGSGGGSGGGYGGGSGSRGGSGGSHGGGSGFGGESGGSYGGGEEASGSGGGYGGGSGKSSHS

SEQ ID NO: 244 - protein, 314 aa, Homo sapiens
MSRVPAFLSAAEVEEHLRSSSLLIPPLETALANFSSGPEGGVMQPVRTVVPVTKHRGYLGVMPAYSAAEDALTTKLVTFYEDRGITSVVPSHQATVLLFEPSNGTLLAVMDGNVITAKRTAAVSAIATKFLKPPSSEVLCILGAGVQAYSHYEIFTEQFSFKEVRIWNRTKENAEKFADTVQGEVRVCSSVQEAVAGADVIITVTLATEPILFGEWVKPGAHINAVGASRPDWRELDDELMKEAVLYVDSQEAALKESGDVLLSGAEIFAELGEVIKGVKPAHCEKTTVFKSLGMAVEDTVAAKLIYDSWSSGK

SEQ ID NO: 245 - protein, 644 aa, Homo sapiens
MKLITILFLCSRLLLSLTQESQSEEIDCNDKDLFKAVDAALKKYNSQNQSNNQFVLYRITEATKTVGSDTFYSFKYEIKEGDCPVQSGKTWQDCEYKDAAKAATGECTATVGKRSSTKFSVATQTCQITPAEGPVVTAQYDCLGCVHPISTQSPDLEPILRHGIQYFNNNTQHSSLFMLNEVKRAQRQVVAGLNFRITYSIVQTNCSKENFLFLTPDCKSLWNGDTGECTDNAYIDIQLRIASFSQNCDIYPGKDFVQPPTKICVGCPRDIPTNSPELEETLTHTITKLNAENNATFYFKIDNVKKARVQVVAGKKYFIDFVARETTCSKESNEELTESCETKKLGQSLDCNAEVYVVPWEKKIYPTVNCQPLGMISLMKRPPGFSPFRSSRIGEIKEETTVSPPHTSMAPAQDEERDSGKEQGHTRRHDWGHEKQRKHNLGHGHKHERDQGHGHQRGHGLGHGHEQQHGLGHGHKFKLDDDLEHQGGHVLDHGHKHKHGHGHGKHKNKGKKNGKHNGWKTEHLASSSEDSTTPSAQTQEKTEGPTPIPSLAKPGVTVTFSDFQDSDLIATMMPPISPAPIQSDDDWIPDIQIDPNGLSFNPISDFPDTTSPKCPGRPWKSVSEINPTTQMKESYYFDLTDGLS

SEQ ID NO: 246 - protein, 644 aa, Homo sapiens; identical to SEQ ID NO: 245

SEQ ID NO: 247 - protein, 712 aa, Homo sapiens
MRVLLHLPALLASLILLQAAASTTRAQTTRTSAISDTVSQAKVQVNKAFLDSRTRLKTAMSSETPTSRQLSEYLKHAKGRTRTAIRNGQVWEESLKRLRQKASLTNVTDPSLDLTSLSLEVGCGAPAPVVRCDPCSPYRTITGDCNNRRKPALGAANRALARWLPAEYEDGLSLPFGWTPGKTRNGFPLPLAREVSNKIVGYLNEEGVLDQNRSLLFMQWGQIVDHDLDFAPDTELGSSEYSKAQCDEYCIQGDNCFPIMFPPNDPKAGTQGKCMPFFRAGFVCPTPPYKSLAREQINALTSFLDASFVYSSEPSLASRLRNLSSPLGLMAVNQEVSDHGLPYLPYDSKKPSPCEFINTTARVPCFLAGDSRASEHILLATSHTLFLREHNRLARELKRLNPQWDGEKLYQEARKILGAFVQIITFRDYLPILLGDHMQKWIPPYQGYSESVDPRISNVFTFAFRFGHLEVPSSMFRLDENYQPWGPEPELPLHTLFFNTWRMVKDGGIDPLVRGLLAKKSKLMKQNKMMTGELRNKLFQPTHRIHGFDLAAINTQRCRDHGQPGYNSWRAFCDLSQPQTLEELNTVLKSKMLAKKLLGLYGTPDNIDIWIGAIAEPLVERGRVGPLLACLLGKQFQQIRDGDRFWWENPGVFTNEQKDSLQKMSFSRLVCDNTRITKVPRDPFWANSYPYDFVDCSAIDKLDLSPWASVKN

SEQ ID NO: 248 - protein, 710 aa, Homo sapiens
MKLVFLVLLFLGALGLCLAGRRRSVQWCAVSQPEATKCFQWQRNMRKVRGPPVSCIKRDSPIQCIQAIAENRADAVTLDGGFIYEAGLAPYKLRPVAAEVYGTERQPRTHYYAVAVVKKGGSFQLNELQGLKSCHTGLRRTAGWNVPIGTLRPFLNWTGPPEPIEAAVARFFSASCVPGADKGQFPNLCRLCAGTGENKCAFSSQEPYFSYSGAFKCLRDGAGDVAFIRESTVFEDLSDEAERDEYELLCPDNTRKPVDKFKDCHLARVPSHAVVARSVNGKEDAIWNLLRQAQEKFGKDKSPKFQLFGSPSGQKDLLFKDSAIGFSRVPPRIDSGLYLGSGYFTAIQNLRKSEEEVAARRARVVWCAVGEQELRKCNQWSGLSEGSVTCSSASTTEDCIALVLKGEADAMSLDGGYVYTAGKCGLVPVLAENYKSQQSSDPDPNCVDRPVEGYLAVAVVRRSDTSLTWNSVKGKKSCHTAVDRTAGWNIPMGLLFNQTGSCKFDEYFSQSCAPGSDPRSNLCALCIGDEQGENKCVPNSNERYYGYTGAFRCLAENAGDVAFVKDVTVLQNTDGNNNEAWAKDLKLADFALLCLDGKRKPVTEARSCHLAMAPNHAVVSRMDKVERLKQVLLHQQAKFGRNGSDCPDKFCLFQSETKNLLFNDNTECLARLHGKTTYEKYLGPQYVAGITNLKKCSTSPLLEACEFLRK

SEQ ID NO: 249 - protein, 222 aa, Homo sapiens
MEIPPTNYPASRAALVAQNYINYQQGTPHRVFEVQKVKQASMEDIPGRGHKYHLKFAVEEIIQKQVKVNCTAEVLYPSTGQETAPEVNFTFEGETGKNPDEEDNTFYQRLKSMKEPLEAQNIPDNFGNVSPEMTLVLHLAWVACGYIIWQNSTEDTWYKMVKIQTVKQVQRNDDFIELDYTILLHNIASQEIIPWQMQVLWHPQYGTKVKHNSRLPKEVQLE

SEQ ID NO: 250 - protein, 379 aa, Homo sapiens
MEQLSSANTRFALDLFLALSENNPAGNIFISPFSISSAMAMVFLGTRGNTAAQLSKTFHFNTVEEVHSRFQSLNADINKRGASYILKLANRLYGEKTYNFLPEFLVSTQKTYGADLASVDFQHASEDARKTINQWVKGQTEGKIPELLASGMVDNMTKLVLVNAIYFKGNWKDKFMKEATTNAPFRLNKKDRKTVKMMYQKKKFAYGYIEDLKCRVLELPYQGEELSMVILLPDDIEDESTGLKKIEEQLTLEKLHEWTKPENLDFIEVNVSLPRFKLEESYTLNSDLARLGVQDLFNSSKADLSGMSGARDIFISKIVHKSFVEVNEEGTEAAAATAGIATFCMLMPEENFTADHPFLFFIRHNSSGSILFLGRFSSP

SEQ ID NO: 251 - protein, 611 aa, Homo sapiens
MPEIVDTCSLASPASVCRTKHLHLRCSVDFTRRTLTGTAALTVQSQEDNLRSLVLDTKDLTIEKVVINGQEVKYALGERQSYKGSPMEISLPIALSKNQEIVIEISFETSPKSSALQWLTPEQTSGKEHPYLFSQCQAIHCRAILPCQDTPSVKLTYTAEVSVPKELVALMSAIRDGETPDPEDPSRKIYKFIQKVPIPCYLIALVVGALESRQIGPRTLVWSEKEQVEKSAYEFSETESMLKIAEDLGGPYVWGQYDLLVLPPSFPYGGMENPCLTFVTPTLLAGDKSLSNVIAHEISHSWTGNLVTNKTWDHFWLNEGHTVYLERHICGRLFGEKFRHFNALGGWGELQNSVKTFGETHPFTKLVVDLTDIDPDVAYSSVPYEKGFALLFYLEQLLGGPEIFLGFLKAYVEKFSYKSITTDDWKDFLYSYFKDKVDVLNQVDWNAWLYSPGLPPIKPNYDMTLTNACIALSQRWITAKEDDLNSFNATDLKDLSSHQLNEFLAQTLQRAPLPLGHIKRMQEVYNFNAINNSEIRFRWLRLCIQSKWEDAIPLALKMATEQGRMKFTRPLFKDLAAFDKSHDQAVRTYQEHKASMHPVTAMLVGKDLKVD

SEQ ID NO: 252 - protein, 261 aa, Homo sapiens
MNPNCARCGKIVYPTEKVNCLDKFWHKACFHCETCKMTLNMKNYKGYEKKPYCNAHYPKQSFTMVADTPENLRLKQQSELQSQVRYKEEFEKNKGKGFSVVADTPELQRIKKTQDQISNIKYHEEFEKSRMGPSGGEGMEPERRDSQDGSSYRRPLEQQQPHHIPTSAPVYQQPQQQPVAQSYGGYKEPAAPVSIQRSAPGGGGKRYRAVYDYSAADEDEVSFQDGDTIVNVQQIDDGWMYGTVERTGDTGMLPANYVEAI

SEQ ID NO: 253 - protein, 176 aa, Homo sapiens
MKPLLLAVSLGLIAALQAHHLLASDEEIQDVSGTWYLKAMTVDREFPEMNLESVTPMTLTTLEGGNLEAKVTMLISGRCQEVKAVLEKTDEPGKYTADGGKHVAYIIRSHVKDHYIFYCEGELHGKPVRGVKLVGRDPKNNLEALEDFEKAAGARGLSTESILIPRQSETCSPGSD

SEQ ID NO: 254 - protein, 649 aa, Homo sapiens
MQQDGLGVGTRNGSGKGRSVHPSWPWCAPRPLRYFGRDARARRAQTAAMALLAGGLSRGLGSHPAAAGRDAVVFVWLLLSTWCTAPARAIQVTVSNPYHVVILFQPVTLPCTYQMTSTPTQPIVIWKYKSFCRDRIADAFSPASVDNQLNAQLAAGNPGYNPYVECQDSVRTVRVVATKQGNAVTLGDYYQGRRITITGNADLTFDQTAWGDSGVYYCSVVSAQDLQGNNEAYAELIVLGRTSGVAELLPGFQAGPIEDWLFVVVVCLAAFLIFLLLGICWCQCCPHTCCCYVRCPCCPDKCCCPEALYAAGKAATSGVPSIYAPSTYAHLSPAKTPPPPAMIPMGPAYNGYPGGYPGDVDRSSSAGGQGSYVPLLRDTDSSVASEVRSGYRIQASQQDDSMRVLYYMEKELANFDPSRPGPPSGRVERAMSEVTSLHEDDWRSRPSRGPALTPIRDEEWGGHSPRSPRGWDQEPAREQAGGGWRARRPRARSVDALDDLTPPSTAESGSRSPTSNGGRSRAYMPPRSRSRDDLYDQDDSRDFPRSRDPHYDDFRSRERPPADPRSHHHRTRDPRDNGSRSGDLPYDGRLLEEAVRKKGSEERRRPHKEEEEEAYYPPAPPPYSETDSQASRERRLKKNLALSRESLVV

SEQ ID NO: 255 - protein, 649 aa, Homo sapiens; identical to SEQ ID NO: 254

SEQ ID NO: 256 - protein, 597 aa, Homo sapiens
MAAVQAAEVKVDGSEPKLSKNELKRRLKAEKKVAEKEAKQKELSEKQLSQATAAATNHTTDNGVGPEEESVDPNQYYKIRSQAIHQLKVNGEDPYPHKFHVDISLTDFIQKYSHLQPGDHLTDITLKVAGRIHAKRASGGKLIFYDLRGEGVKLQVMANSRNYKSEEEFIHINNKLRRGDIIGVQGNPGKTKKGELSIIPYEITLLSPCLHMLPHLHFGLKDKETRYRQRYLDLILNDFVRQKFIIRSKIITYIRSFLDELGFLEIETPMMNIIPGGAVAKPFITYHNELDMNLYMRIAPELYHKMLVVGGIDRVYEIGRQFRNEGIDLTHNPEFTTCEFYMAYADYHDLMEITEKMVSGMVKHITGSYKVTYHPDGPEGQAYDVDFTPPFRRINMVEELEKALGMKLPETNLFETEETRKILDDICVAKAVECPPPRTTARLLDKLVGEFLEVTCINPTFICDHPQIMSPLAKWHRSKEGLTERFELFVMKKEICNAYTELNDPMRQRQLFEEQAKAKAAGDDEAMFIDENFCTALEYGLPPTAGWGMGIDRVAMFLTDSNNIKEVLLFPAMKPEDKKENVATTDTLESTTVGTSV

SEQ ID NO: 257 - protein, 148 aa, Homo sapiens
MKALIVLGLVLLSVTVQGKVFERCELARTLKRLGMDGYRGISLANWMCLAKWESGYNTRATNYNAGDRSTDYGIFQINSRYWCNDGKTPGAVNACHLSCSALLQDNIADAVACAKRVVRDPQGIRAWVAWRNRCQNRDVRQYVQGCGV

SEQ ID NO: 258 - protein, 115 aa, Homo sapiens
MPMFIVNTNVPRASVPDGFLSELTQQLAQATGKPPQYIAVHVVPDQLMAFGGSSEPCALCSLHSIGKIGGAQNRSYSKLLCGLLAERLRISPDRVYINYYDMNAANVGWNNSTFA

SEQ ID NO: 259 - protein, 348 aa, Homo sapiens
MYTAIPQSGSPFPGSVQDPGLHVWRVEKLKPVPVAQENQGVFFSGDSYLVLHNGPEEVSHLHLWIGQQSSRDEQGACAVLAVHLNTLLGERPVQHREVQGNESDLFMSYFPRGLKYQEGGVESAFHKTSTGAPAAIKKLYQVKGKKNIRATERALNWDSFNTGDCFILDLGQNIFAWCGGKSNILERNKARDLALAIRDSERQGKAQVEIVTDGEEPAEMIQVLGPKPALKEGNPEEDLTADKANAQAAALYKVSDATGQMNLTKVADSSPFALELLISDDCFVLDNGLCGKIYIWKGRKANEKERQAALQVAEGFISRMQYAPNTQVEILPQGHESPIFKQFFKDWK

SEQ ID NO: 260 - protein, 334 aa, Homo sapiens
MSEPIRVLVTGAAGQIAYSLLYSIGNGSVFGKDQPIILVLLDITPMMGVLDGVLMELQDCALPLLKDVIATDKEDVAFKDLDVAILVGSMPRREGMERKDLLKANVKIFKSQGAALDKYAKKSVKVIVVGNPANTNCLTASKSAPSIPKENFSCLTRLDHNRAKAQIALKLGVTANDVKNVIIWGNHSSTQYPDVNHAKVKLQGKEVGVYEALKDDSWLKGEFVTTVQQRGAAVIKARKLSSAMSAAKAICDHVRDIWFGTPEGEFVSMGVISDGNSYGVPDDLLYSFPVVIKNKTWKFVEGLPINDFSREKMDLTAKELTEEKESAFEFLSSA

SEQ ID NO: 261 - protein, 95 aa, Homo sapiens
MKLLMVLMLAALLLHCYADSGCKLLEDMVEKTINSDISIPEYKELLQEFIDSDAAAEAMGKFKQCFLNQSHRTLKNFGLMMHTVYDSIWCNMKSN

SEQ ID NO: 262 - protein, 707 aa, Homo sapiens
MSLWQPLVLVLLVLGCCFAAPRQRQSTLVLFPGDLRTNLTDRQLAEEYLYRYGYTRVAEMRGESKSLGPALLLLQKQLSLPETGELDSATLKAMRTPRCGVPDLGRFQTFEGDLKWHHHNITYWIQNYSEDLPRAVIDDAFARAFALWSAVTPLTFTRVYSRDADIVIQFGVAEHGDGYPFDGKDGLLAHAFPPGPGIQGDAHFDDDELWSLGKGVVVPTRFGNADGAACHFPFIFEGRSYSACTTDGRSDGLPWCSTTANYDTDDRFGFCPSERLYTQDGNADGKPCQFPFIFQGQSYSACTTDGRSDGYRWCATTANYDRDKLFGFCPTRADSTVMGGNSAGELCVFPFTFLGKEYSTCTSEGRGDGRLWCATTSNFDSDKKWGFCPDQGYSLFLVAAHEFGHALGLDHSSVPEALMYPMYRFTEGPPLHKDDVNGIRHLYGPRPEPEPRPPTTTTPQPTAPPTVCPTGPPTVHPSERPTAGPTGPPSAGPTGPPTAGPSTATTVPLSPVDDACNVNIFDAIAEIGNQLYLFKDGKYWRFSEGRGSRPQGPFLIADKWPALPRKLDSVFEERLSKKLFFFSGRQVWVYTGASVLGPRRLDKLGLGADVAQVTGALRSGRGKMLLFSGRRLWRFDVKAQMVDPRSASEVDRMFPGVPLDTHDVFQYREKAYFCQDRFYWRVSSRSELNQVDQVGYVTYDILQCPED

SEQ ID NO: 263 - protein, 207 aa, Homo sapiens
MAPFEPLASGILLLLWLIAPSRACTCVPPHPQTAFCNSDLVIRAKFVGTPEVNQTTLYQRYEIKMTKMYKGFQALGDAADIRFVYTPAMESVCGYFHRSHNRSEEFLIAGKLQDGLLHITTCSFVAPWNSLSLAQRRGFTKTYTVGCEECTVFPCLSIPCKLQSGTHCLWTDQLLQGSEKGFQSRHLACLPREPGLCTWQSLRSQIA

SEQ ID NO: 264 - protein, 5654 aa, Homo sapiens
MSVGRRKLALLWALALALACTRHTGHAQDGSSESSYKHHPALSPIARGPSGVPLRGATVFPSLRTIPVVRASNPAHNGRVCSTWGSFHYKTFDGDVFRFPGLCNYVFSEHCGAAYEDFNIQLRRSQESAAPTLSRVLMKVDGVVIQLTKGSVLVNGHPVLLPFSQSGVLIQQSSSYTKVEARLGLVLMWNHDDSLLLELDTKYANKTCGLCGDFNGMPVVSELLSHNTKLTPMEFGNLQKMDDPTDQCQDPVPEPPRNCSTGFGICEELLHGQLFSGCVALVDVGSYLEACRQDLCFCEDTDLLSCVCHTLAEYSRQCTHAGGLPQDWRGPDFCPQKCPNNMQYHECRSPCADTCSNQEHSRACEDHCVAGCFCPEGTVLDDIGQTGCVPVSKCACVYNGAAYAPGATYSTDCTNCTCSGGRWSCQEVPCPGTCSVLGGAHFSTFDGKQYTVHGDCSYVLTKPCDSSAFTVLAELRRCGLTDSETCLKSVTLSLDGAQTVVVIKASGEVFLNQIYTQLPISAANVTIFRPSTFFIIAQTSLGLQLNLQLVPTMQLFMQLAPKLRGQTCGLCGNFNSIQADDFRTLSGVVEATAAAFFNTFKTQAACPNIRNSFEDPCSLSVENEKYAQHWCSQLTDADGPFGRCHAAVKPGTYYSNCMFDTCNCERSEDCLCAALSSYVHACAAKGVQLGGWRDGVCTKPMTTCPKSMTYHYHVSTCQPTCRSLSEGDITCSVGFIPVDGCICPKGTFLDDTGKCVQASNCPCYHRGSMIPNGESVHDSGAICTCTHGKLSCIGGQAPAPVCAAPMVFFDCRNATPGDTGAGCQKSCHTLDMTCYSPQCVPGCVCPDGLVADGEGGCITAEDCPCVHNEASYRAGQTIRVGCNTCTCDSRMWRCTDDPCLATCAVYGDGHYLTFDGQSYSFNGDCEYTLVQNHCGGKDSTQDSFRVVTENVPCGTTGTTCSKAIKIFLGGFELKLSHGKVEVIGTDESQEVPYTIRQMGIYLVVDTDIGLVLLWDKKTSIFINLSPEFKGRVCGLCGNFDDIAVNDFATRSRSVVGDVLEFGNSWKLSPSCPDALAPKDPCTANPFRKSWAQKQCSILHGPTFAACHAHVEPARYYEACVNDACACDSGGDCECFCTAVAAYAQACHEVGLCVSWRTPSICPLFCDYYNPEGQCEWHYQPCGVPCLRTCRNPRGDCLRDVRGLEGCYPKCPPEAPIFDEDKMQCVATCPTPPLPPRCHVHGKSYRPGAVVPSDKNCQSCLCTERGVECTYKAEACVCTYNGQRFHPGDVIYHTTDGTGGCISARCGANGTIERRVYPCSPTTPVPPTTFSFSTPPLVVSSTHTPSNGPSSAHTGPPSSAWPTTAGTSPRTRLPTASASLPPVCGEKCLWSPWMDVSRPGRGTDSGDFDTLENLRAHGYRVCESPRSVECRAEDAPGVPLRALGQRVQCSPDVGLTCRNREQASGLCYNYQIRVQCCTPLPCSTSSSPAQTTPPTTSKTTETRASGSSAPSSTPGTVSLSTARTTPAPGTATSVKKTFSTPSPPPVPATSTSSMSTTAPGTSVVSSKPTPTEPSTSSCLQELCTWTEWIDGSYPAPGINGGDFDTFQNLRDEGYTFCESPRSVQCRAESFPNTPLADLGQDVICSHTEGLICLNKNQLPPICYNYEIRIQCCETVNVCRDITRLPKTVATTRPTPHPTGAQTQTTFTTHMPSASTEQPTATSRGGPTATSVTQGTHTTLVTRNCHPRCTWTKWFDVDFPSPGPHGGDKETYNNIIRSGEKICRRPEEITRLQCRAKSHPEVSIEHLGQVVQCSREEGLVCRNQDQQGPFKMCLNYEVRVLCCETPRGCHMTSTPGSTSSSPAQTTPSTTSKTTETQASGSSAPSSTPGTVSLSTARTTPAPGTATSVKKTFSTPSPPPVPATSTSSMSTTAPGTSVVSSKPTPTEPSTSSCLQELCTWTEWIDGSYPAPGINGGDFDTFQNLRDEGYTFCESPRSVQCRAESFPNTPLADLGQDVICSHTEGLICLNKNQLPPICYNYEIRIQCCETVNVCRDITRPPKTVATTRPTPHPTGAQTQTTFTTHMPSASTEQPTATSRGGPTATSVTQGTHTTPVTRNCHPRCTWTTWFDVDFPSPGPHGGDKETYNNIIRSGEKICRRPEEITRLQCRAKSHPEVSIEHLGQVVQCSREEGLVCRNQDQQGPFKMCLNYEVRVLCCETPKGCPVTSTPVTAPSTPSGRATSPTQSTSSWQKSRTTTLVTTSTTSTPQTSTTYAHTTSTTSAPTARTTSAPTTRTTSASPASTTSGPGNTPSPVPTTSTISAPTTSITSAPTTSTTSAPTSSTTSGPGTTPSPVPTTSITSAPTTSTTSAPTTSTTSARTSSTTSATTTSRISGPETTPSPVPTTSTTSATTTSTTSAPTTSTTSAPTSSTTSSPQTSTTSAPTTSTTSGPGTTPSPVPTTSTTSAPTTRTTSAPKSSTTSAATTSTTSGPETTPRPVPTTSTTSSPTTSTTSAPTTSTTSASTTSTTSGAGTTPSPVPTTSTTSAPTTSTTSAPISSTTSATTTSTTSGPGTTPSPVPTTSTTSAPTTSTTSGPGTTPSAVPTTSITSAPTTSTNSAPISSTTSATTTSRISGPETTPSPVPTASTTSASTTSTTSGPGTTPSPVPTTSTISVPTTSTTSASTTSTTSASTTSTTSGPGTTPSPVPTTSTTSAPTTSTTSAPTTSTISAPTTSTTSATTTSTTSAPTPRRTSAPTTSTISASTTSTTSATTTSTTSATTTSTISAPTTSTTLSPTTSTTSTTITSTTSAPISSTTSTPQTSTTSAPTTSTTSGPGTTSSPVPTTSTTSAPTTSTTSAPTTRTTSVPTSSTTSTATTSTTSGPGTTPSPVPTTSTTSAPTTRTTSAPTTSTTSAPTTSTTSAPTSSTTSATTTSTISVPTTSTTSVPGTTPSPVPTTSTISVPTTSTTSASTTSTTSGPGTTPSPVPTTSTTSAPTTSTTSAPTTSTISAPTTSTPSAPTTSTTLAPTTSTTSAPTTSTTSTPTSSTTSSPQTSTTSASTTSITSGPGTTPSPVPTTSTTSAPTTSTTSAATTSTISAPTTSTTSAPTTSTTSASTASKTSGLGTTPSPIPTTSTTSPPTTSTTSASTASKTSGPGTTPSPVPTTSTIFAPRTSTTSASTTSTTPGPGTTPSPVPTTSTASVSKTSTSHVSISKTTHSQPVTRDCHLRCTWTKWFDIDFPSPGPHGGDKETYNNIIRSGEKICRRPEEITRLQCRAESHPEVSIEHLGQVVQCSREEGLVCRNQDQQGPFKMCLNYEVRVLCCETPKGCPVTSTPVTAPSTPSGRATSPTQSTSSWQKSRTTTLVTTSTTSTPQTSTTSAPTTSTTSAPTTSTTSAPTTSTTSTPQTSISSAPTSSTTSAPTSSTISARTTSIISAPTTSTTSSPTTSTTSATTTSTTSAPTSSTTSTPQTSKTSAATSSTTSGSGTTPSPVTTTSTASVSKTSTSHVSVSKTTHSQPVTRDCHPRCTWTKWFDVDFPSPGPHGGDKETYNNIIRSGEKICRRPEEITRLQCRAKSHPEVSIEHLGQVVQCSREEGLVCRNQDQQGPFKMCLNYEVRVLCCETPKGCPVTSTSVTAPSTPSGRATSPTQSTSSWQKSRTTTLVTSSITSTTQTSTTSAPTTSTTPASIPSTTSAPTTSTTSAPTTSTTSAPTTSTTSTPQTTTSSAPTSSTTSAPTTSTISAPTTSTISAPTTSTTSAPTASTTSAPTSTSSAPTTNTTSAPTTSTTSAPITSTISAPTTSTTSTPQTSTISSPTTSTTSTPQTSTTSSPTTSTTSAPTTSTTSAPTTSTTSTPQTSISSAPTSSTTSAPTASTISAPTTSTTSFHTTSTTSPPTSSTSSTPQTSKTSAATSSTTSGSGTTPSPVPTTSTASVSKTSTSHVSVSKTTHSQPVTRDCHPRCTWTKWFDVDFPSPGPHGGDKETYNNIIRSGEKICRRPEEITRLQCRAESHPEVSIEHLGQVVQCSREEGLVCRNQDQQGPFKMCLNYEVRVLCCETPKGCPVTSTPVTAPSTPSGRATSPTQSTSSWQKSRTTTLVTTSTTSTPQTSTTSAPTTSTIPASTPSTTSAPTTSTTSAPTTSTTSAPTHRTTSGPTTSTTLAPTTSTTSAPTTSTNSAPTTSTISASTTSTISAPTTSTISSPTSSTTSTPQTSKTSAATSSTTSGSGTTPSPVPTTSTTSASTTSTTSAPTTSTTSGPGTTPSPVPSTSTTSAATTSTTSAPTTRTTSAPTSSMTSGPGTTPSPVPTTSTTSAPTTSTTSGPGTTPSPVPTTSTTSAPITSTTSGPGSTPSPVPTTSTTSAPTTSTTSASTASTTSGPGTTPSPVPTTSTTSAPTTRTTSASTASTTSGPGSTPSPVPTTSTTSAPTTRTTPASTASTTSGPGTTPSPVPTTSTTSASTTSTISLPTTSTTSAPITSMTSGPGTTPSPVPTTSTTSAPTTSTTSASTASTTSGPGTTPSPVPTTSTTSAPTTSTTSASTASTTSGPGTSLSPVPTTSTTSAPTTSTTSGPGTTPSPVPTTSTTSAPTTSTTSGPGTTPSPVPTTSTTPVSKTSTSHLSVSKTTHSQPVTSDCHPLCAWTKWFDVDFPSPGPHGGDKETYNNIIRSGEKICRRPEEITRLQCRAESHPEVNIEHLGQVVQCSREEGLVCRNQDQQGPFKMCLNYEVRVLCCETPRGCPVTSVTPYGTSPTNALYPSLSTSMVSASVASTSVASSSVASSSVAYSTQTCFCNVADRLYPAGSTIYRHRDLAGHCYYALCSQDCQVVRGVDSDCPSTTLPPAPATSPSISTSEPVTELGCPNAVPPRKKGETWATPNCSEATCEGNNVISLRPRTCPRVEKPTCANGYPAVKVADQDGCCHHYQCQCVCSGWGDPHYITFDGTYYTFLDNCTYVLVQQIVPVYGHFRVLVDNYFCGAEDGLSCPRSIILEYHQDRVVLTRKPVHGVMTNEIIFNNKVVSPGFRKNGIVVSRIGVKMYATIPELGVQVMFSGLIFSVEVPFSKFANNTEGQCGTCTNDRKDECRTPRGTVVASCSEMSGLWNVSIPDQPACHRPHPTPTTVGPTTVGSTTVGPTTVGSTTVGPTTPPAPCLPSPICQLILSKVFEPCHTVIPPLLFYEGCVFDRCHMTDLDVVCSSLELYAALCASHDICIDWRGRTGHMCPFTCPADKVYQPCGPSNPSYCYGNDSASLGALPEAGPITEGCFCPEGMTLFSTSAQVCVPTGCPRCLGPHGEPVKVGHTVGMDCQECTCEAATWTLTCRPKLCPLPPACPLPGFVPVPAAPQAGQCCPQYSCACNTSRCPAPVGCPEGARAIPTYQEGACCPVQNCSWTVCSINGTLYQPGAVVSSSLCETCRCELPGGPPSDAFVVSCETQICNTHCPVGFEYQEQSGQCCGTCVQVACVTNTSKSPAHLFYPGETWSDAGNHCVTHQCEKHQDGLVVVTTKKACPPLSCSLDEARMSKDGCCRFCPPPPPPYQNQSTCAVYHRSLIIQQQGCSSSEPVRLAYCRGNCGDSSSMYSLEGNTVEHRCQCCQELRTSLRNVTLHCTDGSSRAFSYTEVEECGCMGRRCPAPGDTQHSEEAEPEPSQEAESGSWERGVPVSPMH

SEQ ID NO: 265 - protein, 150 aa, Homo sapiens
MCDFTEDQTAEFKEAFQLFDRTGDGKILYSQCGDVMRALGQNPTNAEVLKVLGNPKSDEMNVKVLDFEHFLPMLQTVAKNKDQGTYEDYVEGLRVFDKEGNGTVMGAEIRHVLVTLGEKMTEEEVEMLVAGHEDSNGCINYEAFVRHILS

SEQ ID NO: 266 - protein, 1995 aa, Homo sapiens
MAAVTMSVPGRKAPPRPGPVPEAAQPFLFTPRGPSAGGGPGSGTSPQVEWTARRLVWVPSELHGFEAAALRDEGEEEAEVELAESGRRLRLPRDQIQRMNPPKFSKAEDMAELTCLNEASVLHNLRERYYSGLIYTYSGLFCVVINPYKQLPIYTEAIVEMYRGKKRHEVPPHVYAVTEGAYRSMLQDREDQSILCTGESGAGKTENTKKVIQYLAHVASSPKGRKEPGVPGELERQLLQANPILEAFGNAKTVKNDNSSRFGKFIRINFDVAGYIVGANIETYLLEKSRAIRQAKDECSFHIFYQLLGGAGEQLKADLLLEPCSHYRFLTNGPSSSPGQERELFQETLESLRVLGFSHEEIISMLRMVSAVLQFGNIALKRERNTDQATMPDNTAAQKLCRLLGLGVTDFSRALLTPRIKVGRDYVQKAQTKEQADFALEALAKATYERLFRWLVLRLNRALDRSPRQGASFLGILDIAGFEIFQLNSFEQLCINYTNEKLQQLFNHTMFVLEQEEYQREGIPWTFLDFGLDLQPCIDLIERPANPPGLLALLDEECWFPKATDKSFVEKVAQEQGGHPKFQRPRHLRDQADFSVLHYAGKVDYKANEWLMKNMDPLNDNVAALLHQSTDRLTAEIWKDVEGIVGLEQVSSLGDGPPGGRPRRGMFRTVGQLYKESLSRLMATLSNTNPSFVRCIVPNHEKRAGKLEPRLVLDQLRCNGVLEGIRICRQGFPNRILFQEFRQRYEILTPNAIPKGFMDGKQACEKMIQALELDPNLYRVGQSKIFFRAGVLAQLEEERDLKVTDIIVSFQAAARGYLARRAFQKRQQQQSALRVMQRNCAAYLKLRHWQWWRLFTKVKPLLQVTRQDEVLQARAQELQKVQELQQQSAREVGELQGRVAQLEEERARLAEQLRAEAELCAEAEETRGRLAARKQELELVVSELEARVGEEEECSRQMQTEKKRLQQHIQELEAHLEAEEGARQKLQLEKVTTEAKMKKFEEDLLLLEDQNSKLSKERKLLEDRLAEFSSQAAEEEEKVKSLNKLRLKYEATIADMEDRLRKEEKGRQELEKLKRRLDGESSELQEQMVEQQQRAEELRAQLGRKEEELQAALARAEDEGGARAQLLKSLREAQAALAEAQEDLESERVARTKAEKQRRDLGEELEALRGELEDTLDSTNAQQELRSKREQEVTELKKTLEEETRIHEAAVQELRQRHGQALGELAEQLEQARRGKGAWEKTRLALEAEVSELRAELSSLQTARQEGEQRRRRLELQLQEVQGRAGDGERARAEAAEKLQRAQAELENVSGALNEAESKTIRLSKELSSTEAQLHDAQELLQEETRAKLALGSRVRAMEAEAAGLREQLEEEAAARERAGRELQTAQAQLSEWRRRQEEEAGALEAGEEARRRAAREAEALTQRLAEKTETVDRLERGRRRLQQELDDATMDLEQQRQLVSTLEKKQRKFDQLLAEEKAAVLRAVEERERAEAEGREREARALSLTRALEEEQEAREELERQNRALRAELEALLSSKDDVGKSVHELERACRVAEQAANDLRAQVTELEDELTAAEDAKLRLEVTVQALKTQHERDLQGRDEAGEERRRQLAKQLRDAEVERDEERKQRTLAVAARKKLEGELEELKAQMASAGQGKEEAVKQLRKMQAQMKELWREVEETRTSREEIFSQNRESEKRLKGLEAEVLRLQEELAASDRARRQAQQDRDEMADEVANGNLSKAAILEEKRQLEGRLGQLEEELEEEQSNSELLNDRYRKLLLQVESLTTELSAERSFSAKAESGRQQLERQIQELRGRLGEEDAGARARHKMTIAALESKLAQAEEQLEQETRERILSGKLVRRAEKRLKEVVLQVEEERRVADQLRDQLEKGNLRVKQLKRQLEEAEEEASRAQAGRRRLQRELEDVTESAESMNREVTTLRNRLRRGPLTFTTRTVRQVFRLEEGVASDEEAEEAQPGSGPSPEPEGSPPAHPQ

SEQ ID NO: 267 - protein, 1946 aa, Homo sapiens
MVESCLLTFRAFFWWIALIKMDLSDLGEAAAFLRRSEAELLLLQATALDGKKKCWIPDGENAYIEAEVKGSEDDGTVIVETADGESLSIKEDKIQQMNPPEFEMIEDMAMLTHLNEASVLHTLKRRYGQWMIYTYSGLFCVTINPYKWLPVYQKEVMAAYKGKRRSEAPPHIFAVANNAFQDMLHNRENQSILFTGESGAGKTVNSKHIIQYFATIAAMIESRKKQGALEDQIMQANTILEAFGNAKTLRNDNSSRFGKFIRMHFGARGMLSSVDIDIYLLEKSRVIFQQAGERNYHIFYQILSGQKELHDLLLVSANPSDFHFCSCGAVTVESLDDAEELLATEQAMDILGFLPDEKYGCYKLTGAIMHFGNMKFKQKPREEQLEADGTENADKAAFLMGINSSELVKCLIHPRIKVGNEYVTRGQTIEQVTCAVGALSKSMYERMFKWLVARINRALDAKLSRQFFIGILDITGFEILEYNSLEQLCINFTNEKLQQFFNWHMFVLEQEEYKKESIEWVSIGFGLDLQACIDLIEKPMGILSILEEECMFPKATDLTFKTKLFDNHFGKSVHLQKPKPDKKKFEAHFELVHYAGVVPYNISGWLEKNKDLLNETVVAVFQKSSNRLLASLFENYMSTDSAIPFGEKKRKKGASFQTVASLHKENLNKLMTNLKSTAPHFVRCINPNVNKIPGILDPYLVLQQLRCNGVLEGTRICREGFPNRLQYADFKQRYCILNPRTFPKSKFVSSRKAAEELLGSLEIDHTQYRFGITKVFFKAGFLGQLEAIRDERLSKVFTLFQARAQGKLMRIKFQKILEERDALILIQWNIRAFMAVKNWPWMRLFFKIKPLVKSSEVGEEVAGLKEECAQLQKALEKSEFQREELKAKQVSLTQEKNDLILQLQAEQETLANVEEQCEWLIKSKIQLEARVKELSERVEEEEEINSELTARGRKLEDECFELKKEIDDLETMLVKSEKEKRTTEHKVKNLTEEVEFLNEDISKLNRAAKVVQEAHQQTLDDLHMEEEKLSSLSKANLKLEQQVDELEGALEQERKARMNCERELHKLEGNLKLNRESMENLESSQRHLAEELRKKELELSQMNSKVENEKGLVAQLQKTVKELQTQIKDLKEKLEAERTTRAKMERERADLTQDLADLNERLEEVGGSSLAQLEITKKQETKFQKLHRDMEEATLHFETTSASLKKRHADSLAELEGQVENLQQVKQKLEKDKSDLQLEVDDLLTRVEQMTRAKANAEKLCTLYEERLHEATAKLDKVTQLANDLAAQKTKLWSESGEFLRRLEEKEALINQLSREKSNFTRQIEDLRGQLEKETKSQSALAHALQKAQRDCDLLREQYEEEQEVKAELHRTLSKVNAEMVQWRMKYENNVIQRTEDLEDAKKELAIRLQEAAEAMGVANARNASLERARHQLQLELGDALSDLGKVRSAAARLDQKQLQSGKALADWKQKHEESQALLDASQKEVQALSTELLKLKNTYEESIVGQETLRRENKNLQEEISNLTNQVREGTKNLTEMEKVKKLIEEEKTEVQVTLEETEGALERNESKILHFQLELLEAKAELERKLSEKDEEIENFRRKQQCTIDSLQSSLDSEAKSRIEVTRLKKKMEEDLNEMELQLSCANRQVSEATKSLGQLQIQIKDLQMQLDDSTQLNSDLKEQVAVAERRNSLLQSELEDLRSLQEQTERGRRLSEEELLEATERINLFYTQNTSLLSQKKKLEADVARMQKEAEEVVQECQNAEEKAKKAAIEAANLSEELKKKQDTIAHLERTRENMEQTITDLQKRLAEAEQMALMGSRKQIQKLESRVRELEGELEGEIRRSAEAQRGARRLERCIKELTYQAEEDKKNLSRMQTQMDKLQLKVQNYKQQVEVAETQANQYLSKYKKQQHELNEVKERAEVAESQVNKLKIKAREFGKKVQEE

SEQ ID NO: 268 - protein, 1960 aa, Homo sapiens
MAQQAADKYLYVDKNFINNPLAQADWAAKKLVWVPSDKSGFEPASLKEEVGEEAIVELVENGKKVKVNKDDIQKMNPPKFSKVEDMAELTCLNEASVLHNLKERYYSGLIYTYSGLFCVVINPYKNLPIYSEEIVEMYKGKKRHEMPPHIYAITDTAYRSMMQDREDQSILCTGESGAGKTENTKKVIQYLAYVASSHKSKKDQGELERQLLQANPILEAFGNAKTVKNDNSSRFGKFIRINFDVNGYIVGANIETYLLEKSRAIRQAKEERTFHIFYYLLSGAGEHLKTDLLLEPYNKYRFLSNGHVTIPGQQDKDMFQETMEAMRIMGIPEEEQMGLLRVISGVLQLGNIVFKKERNTDQASMPDNTAAQKVSHLLGINVTDFTRGILTPRIKVGRDYVQKAQTKEQADFAIEALAKATYERMFRWLVLRINKALDKTKRQGASFIGILDIAGFEIFDLNSFEQLCINYTNEKLQQLFNHTMFILEQEEYQREGIEWNFIDFGLDLQPCIDLIEKPAGPPGILALLDEECWFPKATDKSFVEKVMQEQGTHPKFQKPKQLKDKADFCIIHYAGKVDYKADEWLMKNMDPLNDNIATLLHQSSDKFVSELWKDVDRIIGLDQVAGMSETALPGAFKTRKGMFRTVGQLYKEQLAKLMATLRNTNPNFVRCIIPNHEKKAGKLDPHLVLDQLRCNGVLEGIRICRQGFPNRVVFQEFRQRYEILTPNSIPKGFMDGKQACVLMIKALELDSNLYRIGQSKVFFRAGVLAHLEEERDLKITDVIIGFQACCRGYLARKAFAKRQQQLTAMKVLQRNCAAYLKLRNWQWWRLFTKVKPLLQVSRQEEEMMAKEEELVKVREKQLAAENRLTEMETLQSQLMAEKLQLQEQLQAETELCAEAEELRARLTAKKQELEEICHDLEARVEEEEERCQHLQAEKKKMQQNIQELEEQLEEEESARQKLQLEKVTTEAKLKKLEEEQIILEDQNCKLAKEKKLLEDRIAEFTTNLTEEEEKSKSLAKLKNKHEAMITDLEERLRREEKQRQELEKTRRKLEGDSTDLSDQIAELQAQIAELKMQLAKKEEELQAALARVEEEAAQKNMALKKIRELESQISELQEDLESERASRNKAEKQKRDLGEELEALKTELEDTLDSTAAQQELRSKREQEVNILKKTLEEEAKTHEAQIQEMRQKHSQAVEELAEQLEQTKRVKANLEKAKQTLENERGELANEVKVLLQGKGDSEHKRKKVEAQLQELQVKFNEGERVRTELADKVTKLQVELDNVTGLLSQSDSKSSKLTKDFSALESQLQDTQELLQEENRQKLSLSTKLKQVEDEKNSFREQLEEEEEAKHNLEKQIATLHAQVADMKKKMEDSVGCLETAEEVKRKLQKDLEGLSQRHEEKVAAYDKLEKTKTRLQQELDDLLVDLDHQRQSACNLEKKQKKFDQLLAEEKTISAKYAEERDRAEAEAREKETKALSLARALEEAMEQKAELERLNKQFRTEMEDLMSSKDDVGKSVHELEKSKRALEQQVEEMKTQLEELEDELQATEDAKLRLEVNLQAMKAQFERDLQGRDEQSEEKKKQLVRQVREMEAELEDERKQRSMAVAARKKLEMDLKDLEAHIDSANKNRDEAIKQLRKLQAQMKDCMRELDDTRASREEILAQAKENEKKLKSMEAEMIQLQEELAAAERAKRQAQQERDELADEIANSSGKGALALEEKRRLEARIAQLEEELEEEQGNTELINDRLKKANLQIDQINTDLNLERSHAQKNENARQQLERQNKELKVKLQEMEGTVKSKYKASITALEAKIAQLEEQLDNETKERQAACKQVRRTEKKLKDVLLQVDDERRNAEQYKDQADKASTRLKQLKRQLEEAEEEAQRANASRRKLQRELEDATETADAMNREVSSLKNKLRRGDLPFVVPRRMARKGAGDGSDEEVDGKADGAEAKPAE

SEQ ID NO: 269 - protein, 118 aa, Homo sapiens; identical to SEQ ID NO: 70

SEQ ID NO: 270 - protein, 2078 aa, Homo sapiens
MPGEATETVPATEQELPQPQAETAVLPMSSALSVTAALGQPGPTLPPPCSPAPQQCPLSAANQASPFPSPSTIASTPLEVPFPQSSSGTALPLGTAPEAPTFLPNLIGPPISPAALALASPMIAPTLKGTPSSSAPLALVALAPHSVQKSSAFPPNLLTSPPSVAVAESGSVITLSAPIAPSEPKTNLNKVPSEVVPNPKGTPSPPCIVSTVPYHCVTPMASIQSGVASLPQTTPTTTLAIASPQVKDTTISSVLISPQNPGSLSLKGPVSPPAALSLSTQSLPVVTSSQKTAGPNTPPDFPISLGSHLAPLHQSSFGSVQLLGQTGPSALSDPTVKTISVDHSSTGASYPSQRSVIPPLPSRNEVVPATVAAFPVVAPSVDKGPSTISSITCSPSGSLNVATSFSLSPTTSLILKSSPNATYHYPLVAQMPVSSVGTTPLVVTNPCTIAAAPTTTFEVATCVSPPMSSGPISNIEPTSPAALVMAPVAPKEPSTQVATTLRIPVSPPLPDPEDLKNLPSSVLVKFPTQKDLQTVPASLEGAPFSPAQAGLTTKKDPTVLPLVQAAPKNSPSFQSTSSSPEIPLSPEATLAKKSLGEPLPIGKPASSMTSPLGVNSSASVIKTDSYAGPDSAGPLLKSSLITPTVAAFPLESADPAGVAPTTAKGTSTYTTTASPFLEGTVSLAPKNHPVKEGTLTTLPLVPTASENCPVAPSPQNTCAPLATLVLAPEIPKSVPSPSLPPAGTPPGTKKVDGISHTSALAPVASSPKECPTEDSGASATASSKGTLTYLADSPSPLGVSVSPQTKRPPTKKGSAGPDTPIGNLSSPVSPVEASFLPENSLSFQGSKDSPATTHSPTPPSPKGAPTPSAVTPLSPKGVTLPPKETPTPSVVNLPFPKEGPATPAPKQAPALSMTSSSPKKARATPAPKGIPASPSPKGAPTPPAATPPSPKGGPATPSPKWAPTPPAATPPSPKGGPATPSPKGAPTPPAATPPSPKGGPATPSPKGAPTPPAVTPPSPKGSPAATPFPKGASTPPAATPPSPKGSPAATPLPKGAPTTPAATLPSPKGGPATPSLKGAPTPPAATPPSPKGGPATPSPKGAPMPPAATPPSPKGGLATPPHKGAPTTPAATPPSPKGGLATPPPKGAPTTPAATPPSPKGGLATPPPKGAPTTPAATPPSPKGGLATPSPKGAPTTPAATPPSPKGGLATPSPKGAPTTPAATPPSPKGGLATPSPKGAPTTPAATPPSPKGGPATPPPKGAPTPPAATPPSLKGGLATPPHKGAPNPAVVTPPSPKGGPATSPPKGAPTPPAATPPSPKGSPGTPPPKGAPTPPAVTPPSPKGTPTLPATTPSSKGGPTTPSSKEGPTPPAATPSHKGGPAMTPPSPKRGPAIPSPKGDPTSPAVIPLSPKKAPATPVTREGAATPSKGDLTPPAVTPVSLKKAPATSAPKGGPATPSSKGDPTLPAVTPPSPKEPPAPKQVATSSSPKKAPATPAPMGAPTLPAVIPSSPKEVPATPSSRRDPIAPTATLLSKKTPATLAPKEALIPPAMTVPSPKKTPAIPTPKEAPATPSSKEASSPPAVTPSTYKGAPSPKELLIPPAVTSPSPKEAPTPPAVTPPSPEKGPATPAPKGTPTSPPVTPSSLKDSPTSPASVTCKMGATVPQASKGLPAKKGPTALKEVLVAPAPESTPIITAPTRKGPQTKKSSATSPPICPDPSAKNGSKGPLSTVAPAPLLPVQKDSSKTAKGKDASHSPKGPLAPPESKASTPLTAAAFEKVLPKPESASVSAAPSPPVSLPLAPSPVPTLPPKQQFLPSSPGLVLESPSKPLAPADEDELLPLIPPEPISGGVPFQSVLVNMPTPKSAGIPVPTPSAKQPVTKNNKGSGTESDSDESVPELEEQDSTQATTQQAQLAAAAEIDEEPVSKAKQSRSEKKARKAMSKLGLRQVTGVTRVTIRKSKNILFVITKPDVYKSPASDTYIVFGEAKIEDLSQQAQLAAAEKFKVQGEAVSNIQENTQTPTVQEESEEEEVDETGVEVKDIELVMSQANVSRAKAVRALKNNSNDIVNAIMELTM

SEQ ID NO: 271 - protein, 94 aa, Homo sapiens; identical to SEQ ID NO: 64

SEQ ID NO: 272 - protein, 198 aa, Homo sapiens
MPLGLLWLGLALLGALHAQAQDSTSDLIPAPPLSKVPLQQNFQDNQFQGKWYVVGLAGNAILREDKDPQKMYATIYELKEDKSYNVTSVLFRKKKCDYWIRTFVPGCQPGEFTLGNIKSYPGLTSYLVRVVSTNYNQHAMVFFKKVSQNREYFKITLYGRTKELTSELKENFIRFSKSLGLPENHIVFPVPIDQCIDG

SEQ ID NO: 273 - protein, 746 aa, Homo sapiens
MGDVLSTHLDDARRQHIAEKTGKILTEFLQFYEDQYGVALFNSMRHEIEGTGLPQAQLLWRKVPLDERIVFSGNLFQHQEDSKKWRNRFSLVPHNYGLVLYENKAAYERQVPPRAVINSAGYKILTSVDQYLELIGNSLPGTTAKSGSAPILKCPTQFPLILWHPYARHYYFCMMTEAEQDKWQAVLQDCIRHCNNGIPEDSKVEGPAFTDAIRMYRQSKELYGTWEMLCGNEVQILSNLVMEELGPELKAELGPRLKGKPQERQRQWIQISDAVYHMVYEQAKARFEEVLSKVQQVQPAMQAVIRTDMDQIITSKEHLASKIRAFILPKAEVCVRNHVQPYIPSILEALMVPTSQGFTEVRDVFFKEVTDMNLNVINEGGIDKLGEYMEKLSRLAYHPLKMQSCYEKMESLRLDGLQQRFDVSSTSVFKQRAQIHMREQMDNAVYTFETLLHQELGKGPTKEELCKSIQRVLERVLKKYDYDSSSVRKRFFREALLQISIPFLLKKLAPTCKSELPRFQELIFEDFARFILVENTYEEVVLQTVMKDILQAVKEAAVQRKHNLYRDSMVMHNSDPNLHLLAEGAPIDWGEEYSNSGGGGSPSPSTPESATLSEKRRRAKQVVSVVQDEEVGLPFEASPESPPPASPDGVTEIRGLLAQGLRPESPPPAGPLLNGAPAGESPQPKAAPEASSPPASPLQHLLPGKAVDLGPPKPSDQETGEQVSSPSSHPALHTTTEDSAGVQTEF

SEQ ID NO: 274 - protein, 100 aa, Homo sapiens
MPKRKVSSAEGAAKEEPKRRSARLSAKPPAKVEAKPKKAAAKDKSSDKKVQTKGKRGAKGKQAEVANQETKEDLPAENGETKTEESPASDEAGEKEAKSD

SEQ ID NO: 275 - protein, 420 aa, Homo sapiens
MRWRTILLQYCFLLITCLLTALEAVPIDIDKTKVQNIHPVESAKIEPPDTGLYYDEYLKQVIDVLETDKHFREKLQKADIEEIKSGRLSKELDLVSHHVRTKLDELKRQEVGRLRMLIKAKLDSLQDIGMDHQALLKQFDHLNHLNPDKFESTDLDMLIKAATSDLEHYDKTRHEEFKKYEMMKEHERREYLKTLNEEKRKEEESKFEEMKKKHENHPKVNHPGSKDQLKEVWEETDGLDPNDFDPKTFFKLHDVNSDGFLDEQELEALFTKELEKVYDPKNEEDDMVEMEEERLRMREHVMNEVDTNKDRLVTLEEFLKATEKKEFLEPDSWETLDQQQFFTEEELKEYENIIALQENELKKKADELQKQKEELQRQHDQLEAQKLEYHQVIQQMEQKKLQQGIPPSGPAGELKFEPRV

SEQ ID NO: 276 - protein, 461 aa, Homo sapiens
MPPSGPRGTLLLLPLLLLLLLRAVLAVPLERGAPNKEETPATESPDTGLYYHRYLQEVIDVLETDGHFREKLQAANAEDIKSGKLSRELDFVSHHVRTKLDELKRQEVSRLRMLLKAKMDAEQDPNVQVDHLNLLKQFEHLDPQNQHTFEARDLELLIQTATRDLAQYDAAHHEEFKRYEMLKEHERRRYLESLGEEQRKEAERKLEEQQRRHREHPKVNVPGSQAQLKEVWEELDGLDPNRFNPKTFFILHDINSDGVLDEQELEALFTKELEKVYDPKNEEDDMREMEEERLRMREHVMKNVDTNQDRLVTLEEFLASTQRKEFGDTGEGWETVEMHPAYTEEELRRFEEELAAREAELNAKAQRLSQETEALGRSQGRLEAQKRELQQAVLHMEQRKQQQQQQQGHKAPAAHPEGQLKFHPDTDDVPVPAPAGDQKEVDTSEKKLLERLPEVEVPQHL

SEQ ID NO: 277 - protein, 152 aa, Homo sapiens
MANLERTFIAIKPDGVQRGLVGEIIKRFEQKGFRLVAMKFLRASEEHLKQHYIDLKDRPFFPGLVKYMNSGPVVAMVWEGLNVVKTGRVMLGETNPADSKPGTIRGDFCIQVGRNIIHGSDSVKSAEKEISLWFKPEELVDYKSCAHDWVYE

SEQ ID NO: 278 - protein, 276 aa, Homo sapiens
MTSFRLALIQLQISSIKSDNVTRACSFIREAATQGAKIVSLPECFNSPYGAKYFPEYAEKIPGESTQKLSEVAKECSIYLIGGSIPEEDAGKLYNTCAVFGPDGTLLAKYRKIHLFDIDVPGKITFQESKTLSPGDSFSTFDTPYCRVGLGICYDMRFAELAQIYAQRGCQLLVYPGAFNLTTGPAHWELLQRSRAVDNQVYVATASPARDDKASYVAWGHSTVVNPWGEVLAKAGTEEAIVYSDIDLKKLAEIRQQIPVFRQKRSDLYAVEMKKP

SEQ ID NO: 279 - protein, 329 aa, Homo sapiens
MTTQQIDLQGPGPWGFRLVGGKDFEQPLAISRVTPGSKAALANLCIGDVITAIDGENTSNMTHLEAQNRIKGCTDNLTLTVARSEHKVWSPLVTEEGKRHPYKMNLASEPQEVLHIGSAHNRSAMPFTASPASSTTARVITNQYNNPAGLYSSENISNFNNALESKTAASGVEANSRPLDHAQPPSSLVIDKESEVYKMLQEKQELNEPPKQSTSFLVLQEILESEEKGDPNKPSGFRSVKAPVTKVAASIGNAQKLPMCDKCGTGIVGVFVKLRDRHRHPECYVCTDCGTNLKQKGHFFVEDQIYCEKHARERVTPPEGYEVVTVFPK

SEQ ID NO: 280 - protein, 596 aa, Homo sapiens
MSNYSVSLVGPAPWGFRLQGGKDFNMPLTISSLKDGGKAAQANVRIGDVVLSIDGINAQGMTHLEAQNKIKGCTGSLNMTLQRASAAPKPEPVPVQKGEPKEVVKPVPITSPAVSKVTSTNNMAYNKAPRPFGSVSSPKVTSIPSPSSAFTPAHATTSSHASPSPVAAVTPPLFAASGLHANANLSADQSPSALSAGKTAVNVPRQPTVTSVCSETSQELAEGQRRGSQGDSKQQNGPPRKHIVERYTEFYHVPTHSDASKKRLIEDTEDWRPRTGTTQSRSFRILAQITGTEHLKESEADNTKKANNSQEPSPQLASSVASTRSMPESLDSPTSGRPGVTSLTAAAAFKPVGSTGVIKSPSWQRPNQGVPSTGRISNSATYSGSVAPANSALGQTQPSDQDTLVQRAEHIPAGKRTPMCAHCNQVIRGPFLVALGKSWHPEEFNCAHCKNTMAYIGFVEEKGALYCELCYEKFFAPECGRCQRKILGEVISALKQTWHVSCFVCVACGKPIRNNVFHLEDGEPYCETDYYALFGTICHGCEFPIEAGDMFLEALGYTWHDTCFVCSVCCESLEGQTFFSKKDKPLCKKHAHSVNF

SEQ ID NO: 281 - protein, 165 aa, Homo sapiens
MVNPTVFFDIAVDGEPLGRVSFELFADKVPKTAENFRALSTGEKGFGYKGSCFHRIIPGFMCQGGDFTRHNGTGGKSIYGEKFEDENFILKHTGPGILSMANAGPNTNGSQFFICTAKTEWLDGKHVVFGKVKEGMNIVEAMERFGSRNGKTSKKITIADCGQLE

SEQ ID NO: 282 - protein, 216 aa, Homo sapiens
MLRLSERNMKVLLAAALIAGSVFFLLLPGPSAADEKKKGPKVTVKVYFDLRIGDEDVGRVIFGLFGKTVPKTVDNFVALATGEKGFGYKNSKFHRVIKDFMIQGGDFTRGDGTGGKSIYGERFPDENFKLKHYGPGWVSMANAGKDTNGSQFFITTVKTAWLDGKHVVFGKVLEGMEVVRKVESTKTDSRDKPLKDVIIADCGKIEVEKPFAIAKE

SEQ ID NO: 283 - protein, 108 aa, Homo sapiens
MGVQVETISPGDGRTFPKRGQTCVVHYTGMLEDGKKFDSSRDRNKPFKFMLGKQEVIRGWEEGVAQMSVGQRAKLTISPDYAYGATGHPGIIPPHATLVFDVELLKLE

SEQ ID NO: 284 - protein, 434 aa, Homo sapiens
MSADGAEADGSTQVTVEEPVQQPSVVDRVASMPLISSTCDMVSAAYASTKESYPHIKTVCDAAEKGVRTLTAAAVSGAQPILSKLEPQIASASEYAHRGLDKLEENLPILQQPTEKVLADTKELVSSKVSGAQEMVSSAKDTVATQLSEAVDATRGAVQSGVDKTKSVVTGGVQSVMGSRLGQMVLSGVDTVLGKSEEWADNHLPLTDAELARIATSLDGFDVASVQQQRQEQSYFVRLGSLSERLRQHAYEHSLGKLRATKQRAQEALLQLSQVLSLMETVKQGVDQKLVEGQEKLHQMWLSWNQKQLQGPEKEPPKPEQVESRALTMFRDIAQQLQATCTSLGSSIQGLPTNVKDQVQQARRQVEDLQATFSSIHSFQDLSSSILAQSRERVASAREALDHMVEYVAQNTPVTWLVGPFAPGITEKAPEEKK

SEQ ID NO: 285 - protein, 1756 aa, Homo sapiens
MNSLFRKRNKGKYSPTVQTRSISNKELSELIEQLQKNADQVEKNIVDTEAKMQSDLARLQEGRQPEHRDVTLQKVLDSEKLLYVLEADAAIAKHMKHPQGDMIAEDIRQLKERVTNLRGKHKQIYRLAVKEVDPQVNWAALVEEKLDKLNNQSFGTDLPLVDHQVEEHNIFHNEVKAIGPHLAKDGDKEQNSELRAKYQKLLAASQARQQHLSSLQDYMQRCTNELYWLDQQAKGRMQYDWSDRNLDYPSRRRQYENFINRNLEAKEERINKLHSEGDQLLAAEHPGRNSIEAHMEAVHADWKEYLNLLICEESHLKYMEDYHQFHEDVKDAQELLRKVDSDLNQKYGPDFKDRYQIELLLRELDDQEKVLDKYEDVVQGLQKRGQQVVPLKYRRETPLKPIPVEALCDFEGEQGLISRGYSYTLQKNNGESWELMDSAGNKLIAPAVCFVIPPTDPEALALADSLGSQYRSVRQKAAGSKRTLQQRYEVLKTENPGDASDLQGRQLLAGLDKVASDLDRQEKAITGILRPPLEQGRAVQDSAERAKDLKNITNELLRIEPEKTRSTAEGEAFIQALPGSGTTPLLRTRVEDTNRKYEHLLQLLDLAQEKVDVANRLEKSLQQSWELLATHENHLNQDDTVPESSRVLDSKGQELAAMACELQAQKSLLGEVEQNLQAAKQCSSTLASRFQEHCPDLERQEAEVHKLGQRFNNLRQQVERRAQSLQSAKAAYEHFHRGHDHVLQFLVSIPSYEPQETDSLSQMETKLKNQKNLLDEIASREQEVQKICANSQQYQQAVKDYELEAEKLRSLLDLENGRRSHVSKRARLQSPATKVKEEEAALAAKFTEVYAINRQRLQNLEFALNLLRQQPEVEVTHETLQRNRPDSGVEEAWKIRKELDEETERRRQLENEVKSTQEEIWTLRNQGPQESVVRKEVLKKVPDPVLEESFQQLQRTLAEEQHKNQLLQEELEALQLQLRALEQETRDGGQEYVVKEVLRIEPDRAQADEVLQLREELEALRRQKGAREAEVLLLQQRVAALAEEKSRAQEKVTEKEVVKLQNDPQLEAEYQQLQEDHQRQDQLREKQEEELSFLQDKLKRLEKERAMAEGKITVKEVLKVEKDAATEREVSDLTRQYEDEAAKARASQREKTELLRKIWALEEENAKVVVQEKVREIVRPDPKAESEVANLRLELVEQERKYRGAEEQLRSYQSELEALRRRGPQVEVKEVTKEVIKYKTDPEMEKELQRLREEIVDKTRLIERCDLEIYQLKKEIQALKDTKPQVQTKEVVQEILQFQEDPQTKEEVASLRAKLSEEQKKQVDLERERASQEEQIARKEEELSRVKERVVQQEVVRYEEEPGLRAEASAFAESIDVELRQIDKLRAELRRLQRRRTELERQLEELERERQARREAEREVQRLQQRLAALEQEEAEAREKVTHTQKVVLQQDPQQAREHALLRLQLEEEQHRRQLLEGELETLRRKLAALEKAEVKEKVVLSESVQVEKGDTEQEIQRLKSSLEEESRSKRELDVEVSRLEARLSELEFHNSKSSKELDFLREENHKLQLERQNLQLETRRLQSEINMAATETRDLRNMTVADSGTNHDSRLWSLERELDDLKRLSKDKDLEIDELQKRLGSVAVKREQRENHLRRSIVVIHPDTGRELSPEEAHRAGLIDWNMFVKLRSQECDWEEISVKGPNGESSVIHDRKSGKKFSIEEALQSGRLTPAQYDRYVNKDMSIQELAVLVSGQK

SEQ ID NO: 286 - protein, 199 aa, Homo sapiens
MSSGNAKIGHPAPNFKATAVMPDGQFKDISLSDYKGKYVVFFFYPLDFTFVCPTEIIAFSDRAEEFKKLNCQVIGASVDSHFCHLAWVNTPKKQGGLGPMNIPLVSDPKRTIAQDYGVLKADEGISFRGLFIIDDKGILRQITVNDLPVGRSVDETLRLVQAFQFTDKHGEVCPAGWKPGSDTIKPDVQKSKEYFSKQK

SEQ ID NO: 287 - protein, 198 aa, Homo sapiens
MASGNARIGKPAPDFKATAVVDGAFKEVKLSDYKGKYVVLFFYPLDFTFVCPTEIIAFSNRAEDFRKLGCEVLGVSVDSQFTHLAWINTPRKEGGLGPLNIPLLADVTRRLSEDYGVLKTDEGIAYRGLFIIDGKGVLRQITVNDLPVGRSVDEALRLVQAFQYTDEHGEVCPAGWKPGSDTIKPNVDDSKEYFSKHN

SEQ ID NO: 288 - protein, 214 aa, Homo sapiens
MGLAGVCALRRSAGYILVGGAGGQSAAAAARRYSEGEWASGGVRSFSRAAAAMAPIKVGDAIPAVEVFEGEPGNKVNLAELFKGKKGVLFGVPGAFTPGCSKTHLPGFVEQAEALKAKGVQVVACLSVNDAFVTGEWGRAHKAEGKVRLLADPTGAFGKETDLLLDDSLVSIFGNRRLKRFSMVVQDGIVKALNVEPDGTGLTCSLAPNIISQL

SEQ ID NO: 289 - protein, 224 aa, Homo sapiens
MPGGLLLGDVAPNFEANTTVGRIRFHDFLGDSWGILFSHPRDFTPVCTTELGRAAKLAPEFAKRNVKLIALSIDSVEDHLAWSKDINAYNCEEPTEKLPFPIIDDRNRELAILLGMLDPAEKDEKGMPVTARVVFVFGPDKKLKLSILYPATTGRNFDEILRVVISLQLTAEKRVATPVDWKDGDSVMVLPTIPEEEAKKLFPKGVFTKELPSGKKYLRYTPQP

SEQ ID NO: 290 - protein, 187 aa, Homo sapiens
MPVDLSKWSGPLSLQEVDEQPQHPLHVTYAGAAVDELGKVLTPTQVKNRPTSISWDGLDSGKLYTLVLTDPDAPSRKDPKYREWHHFLVVNMKGNDISSGTVLSDYVGSGPPKGTGLHRYVWLVYEQDRPLKCDEPILSNRSGDHRGKFKVASFRKKYELRAPVAGTCYQAEWDDYVPKLYEQLSGK

SEQ ID NO: 291 - protein, 562 aa, Homo sapiens
MVKIVTVKTQAYQDQKPGTSGLRKRVKVFQSSANYAENFIQSIISTVEPAQRQEATLVVGGDGRFYMKEAIQLIARIAAANGIGRLVIGQNGILSTPAVSCIIRKIKAIGGIILTASHNPGGPNGDFGIKFNISNGGPAPEAITDKIFQISKTIEEYAVCPDLKVDLGVLGKQQFDLENKFKPFTVEIVDSVEAYATMLRSIFDFSALKELLSGPNRLKIRIDAMHGVVGPYVKKILCEELGAPANSAVNCVPLEDFGGHHPDPNLTYAADLVETMKSGEHDFGAAFDGDGDRNMILGKHGFFVNPSDSVAVIAANIFSIPYFQQTGVRGFARSMPTSGALDRVASATKIALYETPTGWKFFGNLMDASKLSLCGEESFGTGSDHIREKDGLWAVLAWLSILATRKQSVEDILKDHWQKYGRNFFTRYDYEEVEAEGANKMMKDLEALMFDRSFVGKQFSANDKVYTVEKADNFEYSDPVDGSISRNQGLRLIFTDGSRIVFRLSGTGSAGATIRLYIDSYEKDVAKINQDPQVMLAPLISIALKVSQLQERTGRTAPTVIT

SEQ ID NO: 292 - protein, 417 aa, Homo sapiens
MSLSNKLTLDKLDVKGKRVVMRVDFNVPMKNNQITNNQRIKAAVPSIKFCLDNGAKSVVLMSHLGRPDGVPMPDKYSLEPVAVELKSLLGKDVLFLKDCVGPEVEKACANPAAGSVILLENLRFHVEEEGKGKDASGNKVKAEPAKIEAFRASLSKLGDVYVNDAFGTAHRAHSSMVGVNLPQKAGGFLMKKELNYFAKALESPERPFLAILGGAKVADKIQLINNMLDKVNEMIIGGGMAFTFLKVLNNMEIGTSLFDEEGAKIVKDLMSKAEKNGVKITLPVDFVTADKFDENAKTGQATVASGIPAGWMGLDCGPESSKKYAEAVTRAKQIVWNGPVGVFEWEAFARGTKALMDEVVKATSRGCITIIGGGDTATCCAKWNTEDKVSHVSTGGGASLELLEGKVLPGVDALSNI

SEQ ID NO: 293 - protein, 144 aa, Homo sapiens
MKTLLLLAVIMIFGLLQAHGNLVNFHRMIKLTTGKEAALSYGFYGCHCGVGGRGSPKDATDRCCVTHDCCYKRLEKRGCGTKFLSYKFSNSGSRITCAKQDSCRSQLCECDKAAATCFARNKTTYNKKYQYYSNKHCRGSTPRC

SEQ ID NO: 294 - protein, 254 aa, Homo sapiens
MAAYKLVLIRHGESAWNLENRFSGWYDADLSPAGHEEAKRGGQALRDAGYEFDICFTSVQKRAIRTLWTVLDAIDQMWLPVVRTWRLNERHYGGLTGLNKAETAAKHGEAQVKIWRRSYDVPPPPMEPDHPFYSNISKDRRYADLTEDQLPSCESLKDTIARALPFWNEEIVPQIKEGKRVLIAAHGNSLRGIVKHLEGLSEEAIMELNLPTGIPIVYELDKNLKPIKPMQFLGDEETVRKAMEAVAAQGKAKK

SEQ ID NO: 295 - protein, 493 aa, Homo sapiens
MALFGALFLALLAGAHAEFPGCKIRVTSKALELVKQEGLRFLEQELETITIPDLRGKEGHFYYNISEVKVTELQLTSSELDFQPQQELMLQITNASLGLRFRRQLLYWFFYDGGYINASAEGVSIRTGLELSRDPAGRMKVSNVSCQASVSRMHAAFGGTFKKVYDFLSTFITSGMRFLLNQQICPVLYHAGTVLLNSLLDTVPVRSSVDELVGIDYSLMKDPVASTSNLDMDFRGAFFPLTERNWSLPNRAVEPQLQEEERMVYVAFSEFFFDSAMESYFRAGALQLLLVGDKVPHDLDMLLRATYFGSIVLLSPAVIDSPLKLELRVLAPPRCTIKPSGTTISVTASVTIALVPPDQPEVQLSSMTMDARLSAKMALRGKALRTQLDLRRFRIYSNHSALESLALIPLQAPLKTMLQIGVMPMLNERTWRGVQIPLPEGINFVHEVVTNHAGFLTIGADLHFAKGLREVIEKNRPADVRASTAPTPSTAAV

SEQ ID NO: 296 - protein, 500 aa, Homo sapiens
MASRLTLLTLLLLLLAGDRASSNPNATSSSSQDPESLQDRGEGKVATTVISKMLFVEPILEVSSLPTTNSTTNSATKITANTTDEPTTQPTTEPTTQPTIQPTQPTTQLPTDSPTQPTTGSFCPGPVTLCSDLESHSTEAVLGDALVDFSLKLYHAFSAMKKVETNMAFSPFSIASLLTQVLLGAGENTKTNLESILSYPKDFTCVHQALKGFTTKGVTSVSQIFHSPDLAIRDTFVNASRTLYSSSPRVLSNNSDANLELINTWVAKNTNNKISRLLDSLPSDTRLVLLNAIYLSAKWKTTFDPKKTRMEPFHFKNSVIKVPMMNSKKYPVAHFIDQTLKAKVGQLQLSHNLSLVILVPQNLKHRLEDMEQALSPSVFKAIMEKLEMSKFQPTLLTLPRIKVTTSQDMLSIMEKLEFFDFSYDLNLCGLTEDPDLQVSAMQHQTVLELTETGVEAAAASAISVARTLLVFEVQQPFLFVLWDQQHKFPVFMGRVYDPRA

SEQ ID NO: 297 - protein, 810 aa, Homo sapiens
MEHKEVVLLLLLFLKSGQGEPLDDYVNTQGASLFSVTKKQLGAGSIEECAAKCEEDEEFTCRAFQYHSKEQQCVIMAENRKSSIIIRMRDVVLFEKKVYLSECKTGNGKNYRGTMSKTKNGITCQKWSSTSPHRPRFSPATHPSEGLEENYCRNPDNDPQGPWCYTTDPEKRYDYCDILECEEECMHCSGENYDGKISKTMSGLECQAWDSQSPHAHGYIPSKFPNKNLKKNYCRNPDRELRPWCFTTDPNKRWELCDIPRCTTPPPSSGPTYQCLKGTGENYRGNVAVTVSGHTCQHWSAQTPHTHNRTPENFPCKNLDENYCRNPDGKRAPWCHTTNSQVRWEYCKIPSCDSSPVSTEQLAPTAPPELTPVVQDCYHGDGQSYRGTSSTTTTGKKCQSWSSMTPHRHQKTPENYPNAGLTMNYCRNPDADKGPWCFTTDPSVRWEYCNLKKCSGTEASVVAPPPVVLLPDVETPSEEDCMFGNGKGYRGKRATTVTGTPCQDWAAQEPHRHSIFTPETNPRAGLEKNYCRNPDGDVGGPWCYTTNPRKLYDYCDVPQCAAPSFDCGKPQVEPKKCPGRVVGGCVAHPHSWPWQVSLRTRFGMHFCGGTLISPEWVLTAAHCLEKSPRPSSYKVILGAHQEVNLEPHVQEIEVSRLFLEPTRKDIALLKLSSPAVITDKVIPACLPSPNYVVADRTECFITGWGETQGTFGAGLLKEAQLPVIENKVCNRYEFLNGRVQSTELCAGHLAGGTDSCQGDSGGPLVCFEKDKYILQGVTSWGLGCARPNKPGVYVRVSRFVTWIEGVMRNN

SEQ ID NO: 298 - protein, 408 aa, Homo sapiens
MPGHLQEGFGCVVTNRFDQLFDDESDPFEVLKAAENKKKEAGGGGVGGPGAKSAAQAAAQTNSNAAGKQLRKESQKDRKNPLPPSVGVVDKKEETQPPVALKKEGIRRVGRRPDQQLQGEGKIIDRRPERRPPRERRFEKPLEEKGEGGEFSVDRPIIDRPIRGRGGLGRGRGGRGRGMGRGDGFDSRGKREFDRHSGSDRSSFSHYSGLKHEDKRGGSGSHNWGTVKDELTESPKYIQKQISYNYSDLDQSNVTEETPEGEEHHPVADTENKENEVEEVKEEGPKEMTLDEWKAIQNKDRAKVEFNIRKPNEGADGQWKKGFVLHKSKSEEAHAEDSVMDHHFRKPANDITSQLEINFGDLGRPGRGGRGGRGGRGRGGRPNRGSRTDKSSASAPDVDDPEAFPALA

SEQ ID NO: 299 - protein, 627 aa, Homo sapiens
MARGSVSDEEMMELREAFAKVDTDGNGYISFNELNDLFKAACLPLPGYRVREITENLMATGDLDQDGRISFDEFIKIFHGLKSTDVAKTFRKAINKKEGICAIGGTSEQSSVGTQHSYSEEEKYAFVNWINKALENDPDCRHVIPMNPNTNDLFNAVGDGIVLCKMINLSVPDTIDERTINKKKLTPFTIQENLNLALNSASAIGCHVVNIGAEDLKEGKPYLVLGLLWQVIKIGLFADIELSRNEALIALLREGESLEDLMKLSPEELLLRWANYHLENAGCNKIGNFSTDIKDSKAYYHLLEQVAPKGDEEGVPAVVIDMSGLREKDDIQRAECMLQQAERLGCRQFVTATDVVRGNPKLNLAFIANLFNRYPALHKPENQDIDWGALEGETREERTFRNWMNSLGVNPRVNHLYSDLSDALVIFQLYEKIKVPVDWNRVNKPPYPKLGGNMKKLENCNYAVELGKNQAKFSLVGIGGQDLNEGNRTLTLALIWQLMRRYTLNILEEIGGGQKVNDDIIVNWVNETLREAKKSSSISSFKDPKISTSLPVLDLIDAIQPGSINYDLLKTENLNDDEKLNNAKYAISMARKIGARVYALPEDLVEVNPKMVMTVFACLMGKGMKRV

SEQ ID NO: 300 - protein, 630 aa, Homo sapiens
MDEMATTQISKDELDELKEAFAKVDLNSNGFICDYELHELFKEANMPLPGYKVREIIQKLMLDGDRNKDGKISFDEFVYIFQEVKSSDIAKTFRKAINRKEGICALGGTSELSSEGTQHSYSEEEKYAFVNWINKALENDPDCRHVIPMNPNTDDLFKAVGDGIVLCKMINLSVPDTIDERAINKKKLTPFIIQENLNLALNSASAIGCHVVNIGAEDLRAGKPHLVLGLLWQIIKIGLFADIELSRNEALAALLRDGETLEELMKLSPEELLLRWANFHLENSGWQKINNFSADIKDSKAYFHLLNQIAPKGQKEGEPRIDINMSGFNETDDLKRAESMLQQADKLGCRQFVTPADVVSGNPKLNLAFVANLFNKYPALTKPENQDIDWTLLEGETREERTFRNWMNSLGVNPHVNHLYADLQDALVILQLYERIKVPVDWSKVNKPPYPKLGANMKKLENCNYAVELGKHPAKFSLVGIGGQDLNDGNQTLTLALVWQLMRRYTLNVLEDLGDGQKANDDIIVNWVNRTLSEAGKSTSIQSFKDKTISSSLAVVDLIDAIQPGCINYDLVKSGNLTEDDKHNNAKYAVSMARRIGARVYALPEDLVEVKPKMVMTVFACLMGRGMKRV

SEQ ID NO: 301 - protein, 229 aa, Homo sapiens
MSQGDSNPAAIPHAAEDIQGDDRWMSQHNRFVLDCKDKEPDVLFVGDSMVQLMQQYEIWRELFSPLHALNFGIGGDTTRHVLWRLKNGELENIKPKVIVVWVGTNNHENTAEEVAGGIEAIVQLINTRQPQAKIIVLGLLPRGEKPNPLRQKNAKVNQLLKVSLPKLANVQLLDTDGGFVHSDGAISCHDMFDFLHLTGGGYAKICKPLHELIMQLLEETPEEKQTTIA

SEQ ID NO: 302 - protein, 108 aa, Homo sapiens
MADPRVRQIKIKTGVVKRLVKEKVMYEKEAKQQEEKIEKMRAEDGENYDIKKQAEILQESRMMIPDCQRRLEAAYLDLQRILENEKDLEEAEEYKEARLVLDSVKLEA

SEQ ID NO: 303 - protein, 156 aa, Homo sapiens
MQIFVKTLTGKTITLEVEPSDTIENVKAKIQDKEGIPPDQQRLIFAGKQLEDGRTLSDYNIQKESTLHLVLRLRGGAKKRKKKSYTTPKKNKHKRKKVKLAVLKYYKVDENGKISRLRRECPSDECGAGVFMASHFDRHYCGKCCLTYCFNKPEDK

SEQ ID NO: 304 - protein, 1058 aa, Homo sapiens
MSSSPLSKKRRVSGPDPKPGSNCSPAQSVLSEVPSVPTNGMAKNGSEADIDEGLYSRQLYVLGHEAMKRLQTSSVLVSGLRGLGVEIAKNIILGGVKAVTLHDQGTAQWADLSSQFYLREEDIGKNRAEVSQPRLAELNSYVPVTAYTGPLVEDFLSGFQVVVLTNTPLEDQLRVGEFCHNRGIKLVVADTRGLFGQLFCDFGEEMILTDSNGEQPLSAMVSMVTKDNPGVVTCLDEARHGFESGDFVSFSEVQGMVELNGNQPMEIKVLGPYTFSICDTSNFSDYIRGGIVSQVKVPKKISFKSLVASLAEPDFVVTDFAKFSRPAQLHIGFQALHQFCAQHGRPPRPRNEEDAAELVALAQAVNARALPAVQQNNLDEDLIRKLAYVAAGDLAPINAFIGGLAAQEVMKACSGKFMPIMQWLYFDALECLPEDKEVLTEDKCLQRQNRYDGQVAVFGSDLQEKLGKQKYFLVGAGAIGCELLKNFAMIGLGCGEGGEIIVTDMDTIEKSNLNRQFLFRPWDVTKLKSDTAAAAVRQMNPHIRVTSHQNRVGPDTERIYDDDFFQNLDGVANALDNVDARMYMDRRCVYYRKPLLESGTLGTKGNVQVVIPFLTESYSSSQDPPEKSIPICTLKNFPNAIEHTLQWARDEFEGLFKQPAENVNQYLTDPKFVERTLRLAGTQPLEVLEAVQRSLVLQRPQTWADCVTWACHHWHTQYSNNIRQLLHNFPPDQLTSSGAPFWSGPKRCPHPLTFDVNNPLHLDYVMAAANLFAQTYGLTGSQDRAAVATFLQSVQVPEFTPKSGVKIHVSDQELQSANASVDDSRLEELKATLPSPDKLPGFKMYPIDFEKDDDSNFHMDFIVAASNLRAENYDIPSADRHKSKLIAGKIIPAIATTTAAVVGLVCLELYKVVQGHRQLDSYKNGFLNLALPFFGFSEPLAAPRHQYYNQEWTLWDRFEVQGLQPNGEEMTLKQFLDYFKTEHKLEITMLSQGVSMLYSFFMPAAKLKERLDQPMTEIVSRVSKRKLGRHVRALVLELCCNDESGEDVEVPYVRYTIR

SEQ ID NO: 305 - protein, 508 aa, Homo sapiens
MSRFVQDLSKAMSQDGASQFQEVIRQELELSVKKELEKILTTASSHEFEHTKKDLDGFRKLFHRFLQEKGPSVDWGKIQRPPEDSIQPYEKIKARGLPDNISSVLNKLVVVKLNGGLGTSMGCKGPKSLIGVRNENTFLDLTVQQIEHLNKTYNTDVPLVLMNSFNTDEDTKKILQKYNHCRVKIYTFNQSRYPRINKESLLPVAKDVSYSGENTEAWYPPGHGDIYASFYNSGLLDTFIGEGKEYIFVSNIDNLGATVDLYILNHLMNPPNGKRCEFVMEVTNKTRADVKGGTLTQYEGKLRLVEIAQVPKAHVDEFKSVSKFKIFNTNNLWISLAAVKRLQEQNAIDMEIIVNAKTLDGGLNVIQLETAVGAAIKSFENSLGINVPRSRFLPVKTTSDLLLVMSNLYSLNAGSLTMSEKREFPTVPLVKLGSSFTKVQDYLRRFESIPDMLELDHLTVSGDVTFGKNVSLKGTVIIIANHGDRIDIPPGAVLENKIVSGNLRILDH

SEQ ID NO: 306 - protein, 409 aa, Homo sapiens
MQVTLKTLQQQTFKIDIDPEETVKALKEKIESEKGKDAFPVAGQKLIYAGKILNDDTALKEYKIDEKNFVVVMVTKPKAVSTPAPATTQQSAPASTTAVTSSTTTTVAQAPTPVPALAPTSTPASITPASATASSEPAPASAAKQEKPAEKPAETPVATSPTATDSTSGDSSRSNLFEDATSALVTGQSYENMVTEIMSMGYEREQVIAALRASFNNPDRAVEYLLMGIPGDRESQAVVDPPQAASTGAPQSSAVAAAAATTTATTTTTSSGGHPLEFLRNQPQFQQMRQIIQQNPSLLPALLQQIGRENPQLLQQISQHQEHFIQMLNEPVQEAGGQGGGGGGGSGGIAEAGSGHMNYIQVTPQEKEAIERLKALGFPEGLVIQAYFACEKNENLAANFLLQQNFDED

SEQ ID NO: 307 - protein, 466 aa, Homo sapiens
MSTRSVSSSSYRRMFGGPGTASRPSSSRSYVTTSTRTYSLGSALRPSTSRSLYASSPGGVYATRSSAVRLRSSVPGVRLLQDSVDFSLADAINTEFKNTRTNEKVELQELNDRFANYIDKVRFLEQQNKILLAELEQLKGQGKSRLGDLYEEEMRELRRQVDQLTNDKARVEVERDNLAEDIMRLREKLQEEMLQREEAENTLQSFRQDVDNASLARLDLERKVESLQEEIAFLKKLHEEEIQELQAQIQEQHVQIDVDVSKPDLTAALRDVRQQYESVAAKNLQEAEEWYKSKFADLSEAANRNNDALRQAKQESTEYRRQVQSLTCEVDALKGTNESLERQMREMEENFAVEAANYQDTIGRLQDEIQNMKEEMARHLREYQDLLNVKMALDIEIATYRKLLEGEESRISLPLPNFSSLNLRETNLDSLPLVDTHSKRTLLIKTVETRDGQVINETSQHHDDLE

SEQ ID NO: 308 - protein, 474 aa, Homo sapiens
MKRVLVLLLAVAFGHALERGRDYEKNKVCKEFSHLGKEDFTSLSLVLYSRKFPSGTFEQVSQLVKEVVSLTEACCAEGADPDCYDTRTSALSAKSCESNSPFPVHPGTAECCTKEGLERKLCMAALKHQPQEFPTYVEPTNDEICEAFRKDPKEYANQFMWEYSTNYGQAPLSLLVSYTKSYLSMVGSCCTSASPTVCFLKERLQLKHLSLLTTLSNRVCSQYAAYGEKKSRLSNLIKLAQKVPTADLEDVLPLAEDITNILSKCCESASEDCMAKELPEHTVKLCDNLSTKNSKFEDCCQEKTAMDVFVCTYFMPAAQLPELPDVELPTNKDVCDPGNTKVMDKYTFELSRRTHLPEVFLSKVLEPTLKSLGECCDVEDSTTCFNAKGPLLKKELSSFIDKGQELCADYSENTFTEYKKKLAERLKAKLPDATPTELAKLVNKHSDFASNCCSINSPPLYCDSEIDAELKNIL

SEQ ID NO: 309 - protein, 511 aa, Homo sapiens
MALRAMRGIVNGAAPELPVPTGGPAVGAREQALAVSRNYLSQPRLTYKTVSGVNGPLVILDHVKFPRYAEIVHLTLPDGTKRSGQVLEVSGSKAVVQVFEGTSGIDAKKTSCEFTGDILRTPVSEDMLGRVFNGSGKPIDRGPVVLAEDFLDIMGQPINPQCRIYPEEMIQTGISAIDGMNSIARGQKIPIFSAAGLPHNEIAAQICRQAGLVKKSKDVVDYSEENFAIVFAAMGVNMETARFFKSDFEENGSMDNVCLFLNLANDPTIERIITPRLALTTAEFLAYQCEKHVLVILTDMSSYAEALREVSAAREEVPGRRGFPGYMYTDLATIYERAGRVEGRNGSITQIPILTMPNDDITHPIPDLTGYITEGQIYVDRQLHNRQIYPPINVLPSLSRLMKSAIGEGMTRKDHADVSNQLYACYAIGKDVQAMKAVVGEEALTSDDLLYLEFLQKFERNFIAQGPYENRTVFETLDIGWQLLRIFPKEMLKRIPQSTLSEFYPRDSAKH

SEQ ID NO: 310 - protein, 118 aa, Homo sapiens
MASQSQGIQQLLQAEKRAAEKVSEARKRKNRRLKQAKEEAQAEIEQYRLQREKEFKAKEAAALGSRGSCSTEVEKETQEKMTILQTYFRQNRDEVLDNLLAFVCDIRPEIHENYRING

SEQ ID NO: 311 - protein, 606 aa, Homo sapiens
MPYEIKKVFASLPQVERGVSKIIGGDPKGNNFLYTNGKCVILRNIDNPALADIYTEHAHQVVVAKYAPSGFYIASGDVSGKLRIWDTTQKEHLLKYEYQPFAGKIKDIAWTEDSKRIAVVGEGREKFGAVFLWDSGSSVGEITGHNKVINSVDIKQSRPYRLATGSDDNCAAFFEGPPFKFKFTIGDHSRFVNCVRFSPDGNRFATASADGQIYIYDGKTGEKVCALGGSKAHDGGIYAISWSPDSTHLLSASGDKTSKIWDVSVNSVVSTFPMGSTVLDQQLGCLWQKDHLLSVSLSGYINYLDRNNPSKPLHVIKGHSKSIQCLTVHKNGGKSYIYSGSHDGHINYWDSETGENDSFAGKGHTNQVSRMTVDESGQLISCSMDDTVRYTSLMLRDYSGQGVVKLDVQPKCVAVGPGGYAVVVCIGQIVLLKDQRKCFSIDNPGYEPEVVAVHPGGDTVAIGGVDGNVRLYSILGTTLKDEGKLLEAKGPVTDVAYSHDGAFLAVCDASKVVTVFSVADGYSENNVFYGHHAKIVCLAWSPDNEHFASGGMDMMVYVWTLSDPETRVKIQDAHRLHHVSSLAWLDEHTLVTTSHDASVKEWTITY

SEQ ID NO: 312 - protein, 623 aa, Homo sapiens
MPPKVTSELLRQLRQAMRNSEYVTEPIQAYIIPSGDAHQSEYIAPCDCRRAFVSGFDGSAGTAIITEEHAAMWTDGRYFLQAAKQMDSNWTLMKMGLKDTPTQEDWLVSVLPEGSRVGVDPLIIPTDYWKKMAKVLRSAGHHLIPVKENLVDKIWTDRPERPCKPLLTLGLDYTGISWKDKVADLRLKMAERNVMWFVVTALDEIAWLFNLRGSDVEHNPVFFSYAIIGLETIMLFIDGDRIDAPSVKEHLLLDLGLEAEYRIQVHPYKSILSELKALCADLSPREKVWVSDKASYAVSETIPKDHRCCMPYTPICIAKAVKNSAESEGMRRAHIKDAVALCELFNWLEKEVPKGGVTEISAADKAEEFRRQQADFVDLSFPTISSTGPNGAIIHYAPVPETNRTLSLDEVYLIDSGAQYKDGTTDVTRTMHFGTPTAYEKECFTYVLKGHIAVSAAVFPTGTKGHLLDSFARSALWDSGLDYLHGTGHGVGSFLNVHEGPCGISYKTFSDEPLEAGMIVTDEPGYYEDGAFGIRIENVVLVVPVKTKYNFNNRGSLTFEPLTLVPIQTKMIDVDSLTDKECDWLNNYHLTCRDVIGKELQKQGRQEALEWLIRETQPISKQH

SEQ ID NO: 313 - protein, 493 aa, Homo sapiens
MAAATGPSFWLGNETLKVPLALFALNRQRLCERLRKNPAVQAGSIVVLQGGEETQRYCTDTGVLFRQESFFHWAFGVTEPGCYGVIDVDTGKSTLFVPRLPASHATWMGKIHSKEHFKEKYAVDDVQYVDEIASVLTSQKPSVLLTLRGVNTDSGSVCREASFDGISKFEVNNTILHPEIVECRVFKTDMELEVLRYTNKISSEAHREVMKAVKVGMKEYELESLFEHYCYSRGGMRHSSYTCICGSGENSAVLHYGHAGAPNDRTIQNGDMCLFDMGGEYYCFASDITCSFPANGKFTADQKAVYEAVLRSSRAVMGAMKPGVWWPDMHRLADRIHLEELAHMGILSGSVDAMVQAHLGAVFMPHGLGHFLGIDVHDVGGYPEGVERIDEPGLRSLRTARHLQPGMVLTVEPGIYFIDHLLDEALADPARASFLNREVLQRFRGFGGVRIEEDVVVTDSGIELLTCVPRTVEEIEACMAGCDKAFTPFSGPK

SEQ ID NO: 314 - protein, 298 aa, Homo sapiens
MVRMVPVLLSLLLLLGPAVPQENQDGRYSLTYIYTGLSKHVEDVPAFQALGSLNDLQFFRYNSKDRKSQPMGLWRQVEGMEDWKQDSQLQKAREDIFMETLKDIVEYYNDSNGSHVLQGRFGCEIENNRSSGAFWKYYYDGKDYIEFNKEIPAWVPFDPAAQITKQKWEAEPVYVQRAKAYLEEECPATLRKYLKYSKNILDRQDPPSVVVTSHQAPGEKKKLKCLAYDFYPGKIDVHWTRAGEVQEPELRGDVLHNGNGTYQSWVVVAVPPQDTAPYSCHVQHSSLAQPLVVPWEAS

SEQ ID NO: 315 - protein, 208 aa, Homo sapiens
MGAQGAQESIKAMWRVPGTTRRPVTGESPGMHRPEAMLLLLTLALLGGPTWAGKMYGPGGGKYFSTTEDYDHEITGLRVSVGLLLVKSVQVKLGDSWDVKLGALGGNTQEVTLQPGEYITKVFVAFQAFLRGMVMYTSKDRYFYFGKLDGQISSAYPSQEGQVLVGIYGQYQLLGIKSIGFEWNYPLEEPTTEPPVNLTYSANSPVGR

SEQ ID NO: 316 - protein, 147 aa, Homo sapiens
MALQRTHSLLLLLLLTLLGLGLVQPSYGQDGMYQRFLRQHVHPEETGGSDRYCNLMMQRRKMTLYHCKRFNTFIHEDIWNIRSICSTTNIQCKNGKMNCHEGVVKVTDCRDTGSSRAPNCRYRAIASTRRVVIACEGNPQVPVHFDG

SEQ ID NO: 317 - protein, 314 aa, Homo sapiens
MGIGRSEGGRRGAALGVLLALGAALLAVGSASEYDYVSFQSDIGPYQSGRFYTKPPQCVDIPADLRLCHNVGYKKMVLPNLLEHETMAEVKQQASSWVPLLNKNCHAGTQVFLCSLFAPVCLDRPIYPCRWLCEAVRDSCEPVMQFFGFYWPEMLKCDKFPEGDVCIAMTPPNATEASKPQGTTVCPPCDNELKSEAIIEHLCASEFALRMKIKEVKKENGDKKIVPKKKKPLKLGPIKKKDLKKLVLYLKNGADCPCHQLDNLSHHFLIMGRKVKSQYLLTAIHKWDKKNKEFKNFMKKMKNHECPTFQSVFK

SEQ ID NO: 318 - protein, 90 aa, Homo sapiens
MRLSVCLLLLTLALCCYRANAVVCQALGSEITGFLLAGKPVFKFQLAKFKAPLEAVAAKMEVKKCVDTMAYEKRVLITKTLGKIAEKCDR

SEQ ID NO: 319 - protein, 235 aa, Homo sapiens
MPNLKDELHHSGWNTCSSCFGDSTKSRTKLVLPSLISSRIYVVDVGSEPRAPKLHKVIEPKDIHAKCELAFLHTSHCLASGEVMISSLGDVKGNGKGGFVLLDGETFEVKGTWERPGGAAPLGYDFWYQPRHNVMISTEWAAPNVLRDGFNPADVEAGLYGSHLYVWDWQRHEIVQTLSLKDGLIPLEIRFLHNPDAAQGFVGCALSSTIQRFYKNEVTYALWPSPPSSLVSSST

SEQ ID NO: 320 - protein, 314 aa, Homo sapiens
MSAAEAGGVFHRARGRTLAAFPAEKESEWKGPFYFILGADPQFGLIKAWSTGDCDNGGDEWEQEIRLTEQAVQAINKLNPKPKFFVLCGDLIHAMPGKPWRTEQTEDLKRVLRAVDRAIPLVLVSGNHDIGNTPTAETVEEFCRTWGDDYFSFWVGGVLFLVLNSQFYENPSKCPSLKQAQDQWLDEQLSIARQRHCQHAIVFQHIPLFLESIDEDDDYYFNLSKSTRKKLADKFIHAGVKVVFSGHYHRNAGGTYQNLDMVVSSAIGCQLGRDPHGLRVVVVTAEKIVHRYYSLDELSEKGIEDDLMDLIKKK

SEQ ID NO: 321 - protein, 483 aa, Homo sapiens
MTMPVNGAHKDADLWSSHDKMLAQPLKDSDVEVYNIIKKESNRQRVGLELIASENFASRAVLEALGSCLNNKYSEGYPGQRYYGGTEFIDELETLCQKRALQAYKLDPQCWGVNVQPYSGSPANFAVYTALVEPHGRIMGLDLPDGGHLTHGFMTDKKKISATSIFFESMPYKVNPDTGYINYDQLEENARLFHPKLIIAGTSCYSRNLEYARLRKIADENGAYLMADMAHISGLVAAGVVPSPFEHCHVVTTTTHKTLRGCRAGMIFYRKGVKSVDPKTGKEILYNLESLINSAVFPGLQGGPHNHAIAGVAVALKQAMTLEFKVYQHQVVANCRALSEALTELGYKIVTGGSDNHLILVDLRSKGTDGGRAEKVLEACSIACNKNTCPGDRSALRPSGLRLGTPALTSRGLLEKDFQKVAHFIHRGIELTLQIQSDTGVRATLKEFKERLAGDKYQAAVQALREEVESFASLFPLPGLPDF

SEQ ID NO: 322 - protein, 375 aa, Homo sapiens
MDALQLANSAFAVDLFKQLCEKEPLGNVLFSPICLSTSLSLAQVGAKGDTANEIGQVLHFENVKDVPFGFQTVTSDVNKLSSFYSLKLIKRLYVDKSLNLSTEFISSTKRPYAKELETVDFKDKLEETKGQINNSIKDLTDGHFENILADNSVNDQTKILVVNAAYFVGKWMKKFSESETKECPFRVNKTDTKPVQMMNMEATFCMGNIDSINCKIIELPFQNKHLSMFILLPKDVEDESTGLEKIEKQLNSESLSQWTNPSTMANAKVKLSIPKFKVEKMIDPKACLENLGLKHIFSEDTSDFSGMSETKGVALSNVIHKVCLEITEDGGDSIEVPGARILQHKDELNADHPFIYIIRHNKTRNIIFFGKFCSP

SEQ ID NO: 323 - protein, 359 aa, Homo sapiens
MPLELELCPGRWVGGQHPCFIIAEIGQNHQGDLDVAKRMIRMAKECGADCAKFQKSELEFKFNRKALERPYTSKHSWGKTYGEHKRHLEFSHDQYRELQRYAEEVGIFFTASGMDEMAVEFLHELNVPFFKVGSGDTNNFPYLEKTAKKGRPMVISSGMQSMDTMKQVYQIVKPLNPNFCFLQCTSAYPLQPEDVNLRVISEYQKLFPDIPIGYSGHETGIAISVAAVALGAKVLERHITLDKTWKGSDHSASLEPGELAELVRSVRLVERALGSPTKQLLPCEMACNEKLGKSVVAKVKIPEGTILTMDMLTVKVGEPKGYPPEDIFNLVGKKVLVTVEEDDTIMEELVDNHGKKIKS

SEQ ID NO: 324 - protein, 750 aa, Homo sapiens
MSQWYELQQLDSKFLEQVHQLYDDSFPMEIRQYLAQWLEKQDWEHAANDVSFATIRFHDLLSQLDDQYSRFSLENNFLLQHNIRKSKRNLQDNFQEDPIQMSMIIYSCLKEERKILENAQRFNQAQSGNIQSTVMLDKQKELDSKVRNVKDKVMCIEHEIKSLEDLQDEYDFKCKTLQNREHETNGVAKSDQKQEQLLLKKMYLMLDNKRKEVVHKIIELLNVTELTQNALINDELVEWKRRQQSACIGGPPNACLDQLQNWFTIVAESLQQVRQQLKKLEELEQKYTYEHDPITKNKQVLWDRTFSLFQQLIQSSFVVERQPCMPTHPQRPLVLKTGVQFTVKLRLLVKLQELNYNLKVKVLFDKDVNERNTVKGFRKFNILGTHTKVMNMEESTNGSLAAEFRHLQLKEQKNAGTRTNEGPLIVTEELHSLSFETQLCQPGLVIDLETTSLPVVVISNVSQLPSGWASILWYNMLVAEPRNLSFFLTPPCARWAQLSEVLSWQFSSVTKRGLNVDQLNMLGEKLLGPNASPDGLIPWTRFCKENINDKNFPFWLWIESILELIKKHLLPLWNDGCIMGFISKERERALLKDQQPGTFLLRFSESSREGAITFTWVERSQNGGEPDFHAVEPYTKKELSAVTFPDIIRNYKVMAAENIPENPLKYLYPNIDKDHAFGKYYSRPKEAPEPMELDGPKGTGYIKTELISVSEVHPSRLQTTDNLLPMSPEEFDEVSRIVGSVEFDSMMNTV

SEQ ID NO: 325 - protein, 72 aa, Homo sapiens
MSYQQQQCKQPCQPPPVCPTPKCPEPCPPPKCPEPCPPPKCPQPCPPQQCQQKYPPVTPSPPCQSKYPPKSK

SEQ ID NO: 326 - protein, 283 aa, Homo sapiens
MASGTTTTAVKIGIIGGTGLDDPEILEGRTEKYVDTPFGKPSDALILGKIKNVDCVLLARHGRQHTIMPSKVNYQANIWALKEEGCTHVIVTTACGSLREEIQPGDIVIIDQFIDRTTMRPQSFYDGSHSCARGVCHIPMAEPFCPKTREVLIETAKKLGLRCHSKGTMVTIEGPRFSSRAESFMFRTWGADVINMTTVPEVVLAKEAGICYASIAMATDYDCWKEHEEAVSVDRVLKTLKENANKAKSLLLTTIPQIGSTEWSETLHNLKNMAQFSVLLPRH

SEQ ID NO: 327 - protein, 357 aa, Homo sapiens
MAAAAKPNNLSLVVHGPGDLRLENYPIPEPGPNEVLLRMHSVGICGSDVHYWEYGRIGNFIVKKPMVLGHEASGTVEKVGSSVKHLKPGDRVAIEPGAPRENDEFCKMGRYNLSPSIFFCATPPDDGNLCRFYKHNAAFCYKLPDNVTFEEGALIEPLSVGIHACRRGGVTLGHKVLVCGAGPIGMVTLLVAKAMGAAQVVVTDLSATRLSKAKEIGADLVLQISKESPQEIARKVEGQLGCKPEVTIECTGAEASIQAGIYATRSGGNLVLVGLGSEMTTVPLLHAAIREVDIKGVFRYCNTWPVAISMLASKSVNVKPLVTHRFPLEKALEAFETFKKGLGLKIMLKCDPSDQNP

SEQ ID NO: 328 - protein, 601 aa, Homo sapiens
MPERELWPAGTGSEPVTRVGSCDSMMSSTSTRSGSSDSSYDFLSTEEKECLLFLEETIGSLDTEADSGLSTDESEPATTPRGFRALPITQPTPRGGPEETITQQGRTPRTVTESSSSHPPEPQGLGLRSGSYSLPRNIHIARSQNFRKSTTQASSHNPGEPGRLAPEPEKEQVSQSSQPRQAPASPQEAALDLDVVLIPPPEAFRDTQPEQCREASLPEGPGQQGHTPQLHTPSSSQEREQTPSEAMSQKAKETVSTRYTQPQPPPAGLPQNARAEDAPLSSGEDPNSRLAPLTTPKPRKLPPNIVLKSSRSSFHSDPQHWLSRHTEAAPGDSGLISCSLQEQRKARKEALEKLGLPQDQDEPGLHLSKPTSSIRPKETRAQHLSPAPGLAQPAAPAQASAAIPAAGKALAQAPAPAPGPAQGPLPMKSPAPGNVAASKSMPISIPKAPRANSALTPPKPESGLTLQESNTPGLRQMNFKSNTLERSGVGLSSYLSTEKDASPKTSTSLGKGSFLDKISPSVLRNSRPRPASLGTGKDFAGIQVGKLADLEQEQSSKRLSYQGQSRDKLPRPPCVSVKISPKGVPNEHRREALKKLGLLKE

SEQ ID NO: 329 - protein, 543 aa, Homo sapiens
MEQVNELKEKGNKALSVGNIDDALQCYSEAIKLDPHNHVLYSNRSAAYAKKGDYQKAYEDGCKTVDLKPDWGKGYSRKAAALEFLNRFEEAKRTYEEGLKHEANNPQLKEGLQNMEARLAERKFMNPFNMPNLYQKLESDPRTRTLLSDPTYRELIEQLRNKPSDLGTKLQDPRIMTTLSVLLGVDLGSMDEEEEIATPPPPPPPKKETKPEPMEEDLPENKKQALKEKELGNDAYKKKDFDTALKHYDKAKELDPTNMTYITNQAAVYFEKGDYNKCRELCEKAIEVGRENREDYRQIAKAYARIGNSYFKEEKYKDAIHFYNKSLAEHRTPDVLKKCQQAEKILKEQERLAYINPDLALEEKNKGNECFQKGDYPQAMKHYTEAIKRNPKDAKLYSNRAACYTKLLEFQLALKDCEECIQLEPTFIKGYTRKAAALEAMKDYTKAMDVYQKALDLDSSCKEAADGYQRCMMAQYNRHDSPEDVKRRAMADPEVQQIMSDPAMRLILEQMQKDPQALSEHLKNPVIAQKIQKLMDVGLIAIR

SEQ ID NO: 330 - protein, 79 aa, Homo sapiens
MKSLTWILGLWALAACFTPGESQRGPRGPYPPGPLAPPQPFGPGFVPPPPPPPYGPGRIPPPPPAPYGPGIFPPPPPQP

SEQ ID NO: 331 - protein, 747 aa, Homo sapiens
MRRCNSGSGPPPSLLLLLLWLLAVPGANAAPRSALYSPSDPLTLLQADTVRGAVLGSRSAWAVEFFASWCGHCIAFAPTWKALAEDVKAWRPALYLAALDCAEETNSAVCRDFNIPGFPTVRFFKAFTKNGSGAVFPVAGADVQTLRERLIDALESHHDTWPPACPPLEPAKLEEIDGFFARNNEEYLALIFEKGGSYLGREVALDLSQHKGVAVRRVLNTEANVVRKFGVTDFPSCYLLFRNGSVSRVPVLMESRSFYTAYLQRLSGLTREAAQTTVAPTTANKIAPTVWKLADRSKIYMADLESALHYILRIEVGRFPVLEGQRLVALKKFVAVLAKYFPGRPLVQNFLHSVNEWLKRQKRNKIPYSFFKTALDDRKEGAVLAKKVNWIGCQGSEPHFRGFPCSLWVLFHFLTVQAARQNVDHSQEAAKAKEVLPAIRGYVHYFFGCRDCASHFEQMAAASMHRVGSPNAAVLWLWSSHNRVNARLAGAPSEDPQFPKVQWPPRELCSACHNERLDVPVWDVEATLNFLKAHFSPSNIILDFPAAGSAARRDVQNVAAAPELAMGALELESRNSTLDPGKPEMMKSPTNTTPHVPAEGPEASRPPKLHPGLRAAPGQEPPEHMAELQRNEQEQPLGQWHLSKRDTGAALLAESRAEKNRLWGPLEVRRVGRSSKQLVDIPEGQLEARAGRGRGQWLQVLGGGFSYLDISLCVGLYSLSFMGLLAMYTYFQAKIRALKGHAGHPAA

SEQ ID NO: 332 - protein, 297 aa, Homo sapiens
MASPQLCRALVSAQWVAEALRAPRAGQPLQLLDASWYLPKLGRDARREFEERHIPGAAFFDIDQCSDRTSPYDHMLPGAEHFAEYAGRLGVGAATHVVIYDASDQGLYSAPRVWWMFRAFGHHAVSLLDGGLRHWLRQNLPLSSGKSQPAPAEFRAQLDPAFIKTYEDIKENLESRRFQVVDSRATGRFRGTEPEPRDGIEPGHIPGTVNIPFTDFLSQEGLEKSPEEIRHLFQEKKVDLSKPLVATCGSGVTACHVALGAYLCGKPDVPIYDGSWVEWYMRARPEDVISEGRGKTH

SEQ ID NO: 333 - protein, 2541 aa, Homo sapiens
MVALSLKISIGNVVKTMQFEPSTMVYDACRIIRERIPEAPAGPPSDFGLFLSDDDPKKGIWLEAGKALDYYMLRNGDTMEYRKKQRPLKIRMLDGTVKTIMVDDSKTVTDMLMTICARIGITNHDEYSLVRELMEEKKEEITGTLRKDKTLLRDEKKMEKLKQKLHTDDELNWLDHGRTLREQGVEEHETLLLRRKFFYSDQNVDSRDPVQLNLLYVQARDDILNGSHPVSFDKACEFAGFQCQIQFGPHNEQKHKAGFLDLKDFLPKEYVKQKGERKIFQAHKNCGQMSEIEAKVRYVKLARSLKTYGVSFFLVKEKMKGKNKLVPRLLGITKECVMRVDEKTKEVIQEWNLTNIKRWAASPKSFTLDFGDYQDGYYSVQTTEGEQIAQLIAGYIDIILKKKKSKDHFGLEGDEESTMLEDSVSPKKSTVLQQQYNRVGKVEHGSVALPAIMRSGASGPENFQVGSMPPAQQQITSGQMHRGHMPPLTSAQQALTGTINSSMQAVQAAQATLDDFDTLPPLGQDAASKAWRKNKMDESKHEIHSQVDAITAGTASVVNLTAGDPAETDYTAVGCAVTTISSNLTEMSRGVKLLAALLEDEGGSGRPLLQAAKGLAGAVSELLRSAQPASAEPRQNLLQAAGNVGQASGELLQQIGESDTDPHFQDALMQLAKAVASAAAALVLKAKSVAQRTEDSGLQTQVIAAATQCALSTSQLVACTKVVAPTISSPVCQEQLVEAGRLVAKAVEGCVSASQAATEDGQLLRGVGAAATAVTQALNELLQHVKAHATGAGPAGRYDQATDTILTVTENIFSSMGDAGEMVRQARILAQATSDLVNAIKADAEGESDLENSRKLLSAAKILADATAKMVEAAKGAAAHPDSEEQQQRLREAAEGLRMATNAAAQNAIKKKLVQRLEHAAKQAAASATQTIAAAQHAASTPKASAGPQPLLVQSCKAVAEQIPLLVQGVRGSQAQPDSPSAQLALIAASQSFLQPGGKMVAAAKASVPTIQDQASAMQLSQCAKNLGTALAELRTAAQKAQEACGPLEMDSALSVVQNLEKDLQEVKAAARDGKLKPLPGETMEKCTQDLGNSTKAVSSAIAQLLGEVAQGNENYAGIAARDVAGGLRSLAQAARGVAALTSDPAVQAIVLDTASDVLDKASSLIEEAKKAAGHPGDPESQQRLAQVAKAVTQALNRCVSCLPGQRDVDNALRAVGDASKRLLSDSLPPSTGTFQEAQSRLNEAAAGLNQAATELVQASRGTPQDLARASGRFGQDFSTFLEAGVEMAGQAPSQEDRAQVVSNLKGISMSSSKLLLAAKALSTDPAAPNLKSQLAAAARAVTDSINQLITMCTQQAPGQKECDNALRELETVRELLENPVQPINDMSYFGCLDSVMENSKVLGEAMTGISQNAKNGNLPEFGDAISTASKALCGFTEAAAQAAYLVGVSDPNSQAGQQGLVEPTQFARANQAIQMACQSLGEPGCTQAQVLSAATIVAKHTSALCNSCRLASARTTNPTAKRQFVQSAKEVANSTANLVKTIKALDGAFTEENRAQCRAATAPLLEAVDNLSAFASNPEFSSIPAQISPEGRAAMEPIVISAKTMLESAGGLIQTARALAVNPRDPPSWSVLAGHSRTVSDSIKKLITSMRDKAPGQLECETAIAALNSCLRDLDQASLAAVSQQLAPREGISQEALHTQMLTAVQEISHLIEPLANAARAEASQLGHKVSQMAQYFEPLTLAAVGAASKTLSHPQQMALLDQTKTLAESALQLLYTAKEAGGNPKQAAHTQEALEEAVQMMTEAVEDLTTTLNEAASAAGVVGGMVDSITQAINQLDEGPMGEPEGSFVDYQTTMVRTAKAIAVTVQEMVTKSNTSPEELGPLANQLTSDYGRLASEAKPAAVAAENEEIGSHIKHRVQELGHGCAALVTKAGALQCSPSDAYTKKELIECARRVSEKVSHVLAALQAGNRGTQACITAASAVSGIIADLDTTIMFATAGTLNREGTETFADHREGILKTAKVLVEDTKVLVQNAAGSQEKLAQAAQSSVATITRLADVVKLGAASLGAEDPETQVVLINAVKDVAKALGDLISATKAAAGKVGDDPAVWQLKNSAKVMVTNVTSLLKTVKAVEDEATKGTRALEATTEHIRQELAVFCSPEPPAKTSTPEDFIRMTKGITMATAKAVAAGNSCRQEDVIATANLSRRAIADMLRACKEAAYHPEVAPDVRLRALHYGRECANGYLELLDHVLLTLQKPSPELKQQLTGHSKRVAGSVTELIQAAEAMKGTEWVDPEDPTVIAENELLGAAAAIEAAAKKLEQLKPRAKPKEADESLNFEEQILEAAKSIAAATSALVKAASAAQRELVAQGKVGAIPANALDDGQWSQGLISAARMVAAATNNLCEAANAAVQGHASQEKLISSAKQVAASTAQLLVACKVKADQDSEAMKRLQAAGNAVKRASDNLVKAAQKAAAFEEQENETVVVKEKMVGGIAQIIAAQEEMLRKERELEEARKKLAQIRQQQYKFLPSELRDEH

SEQ ID NO: 334 - protein, 124 aa, Homo sapiens
MSYIPGQPVTAVVQRVEIHKLRQGENLILGFSIGGGIDQDPSQNPFSEDKTDKGIYVTRVSEGGPAEIAGLQIGDKIMQVNGWDMTMVTHDQARKRLTKRSEEVVRLLVTRQSLQKAVQQSMLS

SEQ ID NO: 335 - protein, 535 aa, Homo sapiens
MASLSLAPVNIFKAGADEERAETARLTSFIGAIAIGDLVKSTLGPKGMDKILLSSGRDASLMVTNDGATILKNIGVDNPAAKVLVDMSRVQDDEVGDGTTSVTVLAAELLREAESLIAKKIHPQTIIAGWREATKAAREALLSSAVDHGSDEVKFRQDLMNIAGTTLSSKLLTHHKDHFTKLAVEAVLRLKGSGNLEAIHIIKKLGGSLADSYLDEGFLLDKKIGVNQPKRIENAKILIANTGMDTDKIKIFGSRVRVDSTAKVAEIEHAEKEKMKEKVERILKHGINCFINRQLIYNYPEQLFGAAGVMAIEHADFAGVERLALVTGGEIASTFDHPELVKLGSCKLIEEVMIGEDKLIHFSGVALGEACTIVLRGATQQILDEAERSLHDALCVLAQTVKDSRTVYGGGCSEMLMAHAVTQLANRTPGKEAVAMESYAKALRMLPTIIADNAGYDSADLVAQLRAAHSEGNTTAGLDMREGTIGDMAILGITESFQVKRQVLLSAAEAAEVILRVDNIIKAAPRKRVPDHHPC

SEQ ID NO: 336 - protein, 105 aa, Homo sapiens
MVKQIESKTAFQEALDAAGDKLVVVDFSATWCGPCKMIKPFFHSLSEKYSNVIFLEVDVDDCQDVASECEVKCMPTFQFFKKGQKVGEFSGANKEKLEATINELV

SEQ ID NO: 337 - protein, 289 aa, Homo sapiens
MVGVKPVGSDPDFQPELSGAGSRLAVVKFTMRGCGPCLRIAPAFSSMSNKYPQAVFLEVDVHQCQGTAATNNISATPTFLFFRNKVRIDQYQGADAVGLEEKIKQHLENDPGSNEDTDIPKGYMDLMPFINKAGCECLNESDEHGFDNCLRKDTTFLESDCDEQLLITVAFNQPVKLYSMKFQGPDNGQGPKYVKIFINLPRSMDFEEAERSEPTQALELTEDDIKEDGIVPLRYVKFQNVNSVTIFVQSNQGEEETTRISYFTFIGTPVQATNMNDFKRVVGKKGESH

SEQ ID NO: 338 - protein, 516 aa, Homo sapiens
MPSSTSPDQGDDLENCILRFSDLDLKDMSLINPSSSLKAELDGSTKKKYSFAKKKAFALFVKTKEVPTKRSFECKEKLWKCCRQLFTDQTSIHRHVATQHADEIYHQTASILKQLAVTLSTSKSLSSADEKNPLKECLPHSHDVSAWLPDISCFNPDELISGQGSEEGEVLLYYCYHDLEDPQWICAWQTALCQHLHLTGKIRIAAEGINGTVGGSKLATRLYVEVMLSFPLFKDDLCKDDFKTSKGGAHCFPELRVGVFEEIVPMGISPKKISYKKPGIHLSPGEFHKEVEKFLSQANQEQSDTILLDCRNFYESKIGRFQGCLAPDIRKFSYFPSYVDKNLELFREKRVLMYCTGGIRCERGSAYLKAKGVCKEVFQLKGGIHKYLEEFPDGFYKGKLFVFDERYALSYNSDVVSECSYCGARWDQYKLCSTPQCRQLVLTCPACQGQGFTACCVTCQDKGSRKVSGPMQDSFKEECECTARRPRIPRELLQHVRQPVSPEPGPDADEDGPVLM

SEQ ID NO: 339 - protein, 44 aa, Homo sapiens
MADKPDMGEIASFDKAKLKKTETQEKNTLPTKETIEQEKRSEIS

SEQ ID NO: 340 - protein, 482 aa, Homo sapiens
MAALMTPGTGAPPAPGDFSGEGSQGLPDPSPEPKQLPELIRMKRDGGRLSEADIRGFVAAVVNGSAQGAQIGAMLMAIRLRGMDLEETSVLTQALAQSGQQLEWPEAWRQQLVDKHSTGGVGDKVSLVLAPALAACGCKVPMISGRGLGHTGGTLDKLESIPGFNVIQSPEQMQVLLDQAGCCIVGQSEQLVPADGILYAARDVTATVDSLPLITASILSKKLVEGLSALVVDVKFGGAAVFPNQEQARELAKTLVGVGASLGLRVAAALTAMDKPLGRCVGHALEVEEALLCMDGAGPPDLRDLVTTLGGALLWLSGHAGTQAQGAARVAAALDDGSALGRFERMLAAQGVDPGLARALCSGSPAERRQLLPRAREQEELLAPADGTVELVRALPLALVLHELGAGRSRAGEPLRLGVGAELLVDVGQRLRRGTPWLRVHRDGPALSGPQSRALQEALVLSDRAPFAAPSPFAELVLPPQQ

SEQ ID NO: 341 - protein, 44 aa, Homo sapiens
MSDKPDMAEIEKFDKSKLKKTETQEKNPLPSKETIEQEKQAGES

SEQ ID NO: 342 - protein, 337 aa, Homo sapiens
MSSSPVKRQRMESALDQLKQFTTVVADTGDFHAIDEYKPQDATTNPSLILAAAQMPAYQELVEEAIAYGRKLGGSQEDQIKNAIDKLFVLFGAEILKKIPGRVSTEVDARLSFDKDAMVARARRLIELYKEAGISKDRILIKLSSTWEGIQAGKELEEQHGIHCNMTLLFSFAQAVACAEAGVTLISPFVGRILDWHVANTDKKSYEPLEDPGVKSVTKIYNYYKKFSYKTIVMGASFRNTGEIKALAGCDFLTISPKLLGELLQDNAKLVPVLSAKAAQASDLEKIHLDEKSFRWLHNEDQMAVEKLSDGIRKFAADAVKLERMLTERMFNAENGK

SEQ ID NO: 343 - protein, 433 aa, Homo sapiens
MRQSHQLPLVGLLLFSFIPSQLCEICEVSEENYIRLKPLLNTMIQSNYNRGTSAVNVVLSLKLVGIQIQTLMQKMIQQIKYNVKSRLSDVSSGELALIILALGVCRNAEENLIYDYHLIDKLENKFQAEIENMEAHNGTPLTNYYQLSLDVLALCLFNGNYSTAEVVNHFTPENKNYYFGSQFSVDTGAMAVLALTCVKKSLINGQIKADEGSLKNISIYTKSLVEKILSEKKENGLIGNTFSTGEAMQALFVSSDYYNENDWNCQQTLNTVLTEISQGAFSNPNAAAQVLPALMGKTFLDINKDSSCVSASGNFNISADEPITVTPPDSQSYISVNYSVRINETYFTNVTVLNGSVFLSVMEKAQKMNDTIFGFTMEERSWGPYITCIQGLCANNNDRTYWELLSGGEPLSQGAGSYVVRNGENLEVRWSKY

SEQ ID NO: 344 - protein, 193 aa, Homo sapiens
MAAIRKKLVIVGDGACGKTCLLIVFSKDQFPEVYVPTVFENYVADIEVDGKQVELALWDTAGQEDYDRLRPLSYPDTDVILMCFSIDSPDSLENIPEKWTPEVKHFCPNVPIILVGNKKDLRNDEHTRRELAKMKQEPVKPEEGRDMANRIGAFGYMECSAKTKDGVREVFEMATRAALQARRGKKKSGCLVL

SEQ ID NO: 345 - protein, 199 aa, Homo sapiens
MANRGPAYGLSREVQQKIEKQYDADLEQILIQWITTQCRKDVGRPQPGRENFQNWLKDGTVLCELINALYPEGQAPVKKIQASTMAFKQMEQISQFLQAAERYGINTTDIFQTVDLWEGKNMACVQRTLMNLGGLAVARDDGLFSGDPNWFPKKSKENPRNFSDNQLQEGKNVIGLQMGTNRGASQAGMTGYGMPRQIL

SEQ ID NO: 346 - protein, 806 aa, Homo sapiens
MASGADSKGDDLSTAILKQKNRPNRLIVDEAINEDNSVVSLSQPKMDELQLFRGDTVLLKGKKRREAVCIVLSDDTCSDEKIRMNRVVRNNLRVRLGDVISIQPCPDVKYGKRIHVLPIDDTVEGITGNLFEVYLKPYFLEAYRPIRKGDIFLVRGGMRAVEFKVVETDPSPYCIVAPDTVIHCEGEPIKREDEEESLNEVGYDDIGGCRKQLAQIKEMVELPLRHPALFKAIGVKPPRGILLYGPPGTGKTLIARAVANETGAFFFLINGPEIMSKLAGESESNLRKAFEEAEKNAPAIIFIDELDAIAPKREKTHGEVERRIVSQLLTLMDGLKQRAHVIVMAATNRPNSIDPALRRFGRFDREVDIGIPDATGRLEILQIHTKNMKLADDVDLEQVANETHGHVGADLAALCSEAALQAIRKKMDLIDLEDETIDAEVMNSLAVTMDDFRWALSQSNPSALRETVVEVPQVTWEDIGGLEDVKRELQELVQYPVEHPDKFLKFGMTPSKGVLFYGPPGCGKTLLAKAIANECQANFISIKGPELLTMWFGESEANVREIFDKARQAAPCVLFFDELDSIAKARGGNIGDGGGAADRVINQILTEMDGMSTKKNVFIIGATNRPDIIDPAILRPGRLDQLIYIPLPDEKSRVAILKANLRKSPVAKDVDLEFLAKMTNGFSGADLTEICQRACKLAIRESIESEIRRERERQTNPSAMEVEEDDPVPEIRRDHFEEAMRFARRSVSDNDIRKYEMFAQTLQQSRGFGSFRFPSGNQGGAGPSQGSGGGTGGSVYTEDNDDDLYG

SEQ ID NO: 347 - protein, 623 aa, Homo sapiens
MESYHKPDQQKLQALKDTANRLRISSIQATTAAGSGHPTSCCSAAEIMAVLFFHTMRYKSQDPRNPHNDRFVLSKGHAAPILYAVWAEAGFLAEAELLNLRKISSDLDGHPVPKQAFTDVATGSLGQGLGAACGMAYTGKYFDKASYRVYCLLGDGELSEGSVWEAMAFASIYKLDNLVAILDINRLGQSDPAPLQHQMDIYQKRCEAFGWHAIIVDGHSVEELCKAFGQAKHQPTAIIAKTFKGRGITGVEDKESWHGKPLPKNMAEQIIQEIYSQIQSKKKILATPPQEDAPSVDIANIRMPSLPSYKVGDKIATRKAYGQALAKLGHASDRIIALDGDTKNSTFSEIFKKEHPDRFIECYIAEQNMVSIAVGCATRNRTVPFCSTFAAFFTRAFDQIRMAAISESNINLCGSHCGVSIGEDGPSQMALEDLAMFRSVPTSTVFYPSDGVATEKAVELAANTKGICFIRTSRPENAIIYNNNEDFQVGQAKVVLKSKDDQVTVIGAGVTLHEALAAAELLKKEKINIRVLDPFTIKPLDRKLILDSARATKGRILTVEDHYYEGGIGEAVSSAVVGEPGITVTHLAVNRVPRSGKPAELLKMFGIDRDAIAQAVRGLITKA

SEQ ID NO: 348 - protein, 147 aa, Homo sapiens
MASHRLLLLCLAGLVFVSEAGPTGTGESKCPLMVKVLDAVRGSPAINVAVHVFRKAADDTWEPFASGKTSESGELHGLTTEEEFVEGIYKVEIDTKSYWKALGISPFHEHAEVVFTANDSGPRRYTIAALLSPYSYSTTAVVTNPKE

SEQ ID NO: 349 - protein, 94 aa, Homo sapiens
MKRVLSCVPEPTVVMAARALCMLGLVLALLSSSSAEEYVGLSANQCAVPAKDRVDCGYPHVTPKECNNRGCCFDSRIPGVPWCFKPLQEAECTF

SEQ ID NO: 350 - protein, 286 aa, Homo sapiens
MAEDGEEAEFHFAALYISGQWPRLRADTDLQRLGSSAMAPSRKFFVGGNWKMNGRKQSLGELIGTLNAAKVPADTEVVCAPPTAYIDFARQKLDPKIAVAAQNCYKVTNGAFTGEISPGMIKDCGATWVVLGHSERRHVFGESDELIGQKVAHALAEGLGVIACIGEKLDEREAGITEKVVFEQTKVIADNVKDWSKVVLAYEPVWAIGTGKTATPQQAQEVHEKLRGWLKSNVSDAVAQSTRIIYGGSVTGATCKELASQPDVDGFLVGGASLKPEFVDIINAKQ

SEQ ID NO: 351 - protein, 285 aa, Homo sapiens
MMEAIKKKMQMLKLDKENALDRAEQAEAEQKQAEERSKQLEDELAAMQKKLKGTEDELDKYSEALKDAQEKLELAEKKAADAEAEVASLNRRIQLVEEELDRAQERLATALQKLEEAEKAADESERGMKVIENRALKDEEKMELQEIQLKEAKHIAEEADRKYEEVARKLVIIEGDLERTEERAELAESKCSELEEELKNVTNNLKSLEAQAEKYSQKEDKYEEEIKILTDKLKEAETRAEFAERSVAKLEKTIDDLEDELYAQKLKYKAISEELDHALNDMTSI

SEQ ID NO: 352 - protein, 248 aa, Homo sapiens
MAGLNSLEAVKRKIQALQQQADEAEDRAQGLQRELDGERERREKAEGDVAALNRRIQLVEEELDRAQERLATALQKLEEAEKAADESERGMKVIENRAMKDEEKMEIQEMQLKEAKHIAEEADRKYEEVARKLVILEGELERAEERAEVSELKCGDLEEELKNVTNNLKSLEAASEKYSEKEDKYEEEIKLLSDKLKEAETRAEFAERTVAKLEKTIDDLEEKLAQAKEENVGLHQTLDQTLNELNCI

SEQ ID NO: 353 - protein, 471 aa, Homo sapiens
MPNSEPASLLELFNSIATQGELVRSLKAGNASKDEIDSAVKMLVSLKMSYKAAAGEDYKADCPPGNPAPTSNHGPDATEAEEDFVDPWTVQTSSAKGIDYDKLIVRFGSSKIDKELINRIERATGQRPHHFLRRGIFFSHRDMNQVLDAYENKKPFYLYTGRGPSSEAMHVGHLIPFIFTKWLQDVFNVPLVIQMTDDEKYLWKDLTLDQAYSYAVENAKDIIACGFDINKTFIFSDLDYMGMSSGFYKNVVKIQKHVTFNQVKGIFGFTDSDCIGKISFPAIQAAPSFSNSFPQIFRDRTDIQCLIPCAIDQDPYFRMTRDVAPRIGYPKPALLHSTFFPALQGAQTKMSASDPNSSIFLTDTAKQIKTKVNKHAFSGGRDTIEEHRQFGGNCDVDVSFMYLTFFLEDDDKLEQIRKDYTSGAMLTGELKKALIEVLQPLIAEHQARRKEVTDEIVKEFMTPRKLSFDFQ

SEQ ID NO: 354 - protein, 4684 aa, Homo sapiens
MVAGMLMPRDQLRAIYEVLFREGVMVAKKDRRPRSLHPHVPGVTNLQVMRAMASLRARGLVRETFAWCHFYWYLTNEGIAHLRQYLHLPPEIVPASLQRVRRPVAMVMPARRTPHVQAVQGPLGSPPKRGPLPTEEQRVYRRKELEEVSPETPVVPATTQRTLARPGPEPAPATDERDRVQKKTFTKWVNKHLIKAQRHISDLYEDLRDGHNLISLLEVLSGDSLPREKGRMRFHKLQNVQIALDYLRHRQVKLVNIRNDDIADGNPKLTLGLIWTIILHFQISDIQVSGQSEDMTAKEKLLLWSQRMVEGYQGLRCDNFTSSWRDGRLFNAIIHRHKPLLIDMNKVYRQTNLENLDQAFSVAERDLGVTRLLDPEDVDVPQPDEKSIITYVSSLYDAMPRVPDVQDGVRANELQLRWQEYRELVLLLLQWMRHHTAAFEERRFPSSFEEIEILWSQFLKFKEMELPAKEADKNRSKGIYQSLEGAVQAGQLKVPPGYHPLDVEKEWGKLHVAILEREKQLRSEFERLECLQRIVTKLQMEAGLCEEQLNQADALLQSDVRLLAAGKVPQRAGEVERDLDKADSMIRLLFNDVQTLKDGRHPQGEQMYRRVYRLHERLVAIRTEYNLRLKAGVAAPATQVAQVTLQSVQRRPELEDSTLRYLQDLLAWVEENQHRVDGAEWGVDLPSVEAQLGSHRGLHQSIEEFRAKIERARSDEGQLSPATRGAYRDCLGRLDLQYAKLLNSSKARLRSLESLHSFVAAATKELMWLNEKEEEEVGFDWSDRNTNMTAKKESYSALMRELELKEKKIKELQNAGDRLLREDHPARPTVESFQAALQTQWSWMLQLCCCIEAHLKENAAYFQFFSDVREAEGQLQKLQEALRRKYSCDRSATVTRLEDLLQDAQDEKEQLNEYKGHLSGLAKRAKAVVQLKPRHPAHPMRGRLPLLAVCDYKQVEVTVHKGDECQLVGPAQPSHWKVLSSSGSEAAVPSVCFLVPPPNQEAQEAVTRLEAQHQALVTLWHQLHVDMKSLLAWQSLRRDVQLIRSWSLATFRTLKPEEQRQALHSLELHYQAFLRDSQDAGGFGPEDRLMAEREYGSCSHHYQQLLQSLEQGAQEESRCQRCISELKDIRLQLEACETRTVHRLRLPLDKEPARECAQRIAEQQKAQAEVEGLGKGVARLSAEAEKVLALPEPSPAAPTLRSELELTLGKLEQVRSLSAIYLEKLKTISLVIRGTQGAEEVLRAHEEQLKEAQAVPATLPELEATKASLKKLRAQAEAQQPTFDALRDELRGAQEVGERLQQRHGERDVEVERWRERVAQLLERWQAVLAQTDVRQRELEQLGRQLRYYRESADPLGAWLQDARRRQEQIQAMPLADSQAVREQLRQEQALLEEIERHGEKVEECQRFAKQYINAIKDYELQLVTYKAQLEPVASPAKKPKVQSGSESVIQEYVDLRTHYSELTTLTSQYIKFISETLRRMEEEERLAEQQRAEERERLAEVEAALEKQRQLAEAHAQAKAQAEREAKELQQRMQEEVVRREEAAVDAQQQKRSIQEELQQLRQSSEAEIQAKARQAEAAERSRLRIEEEIRVVRLQLEATERQRGGAEGELQALRARAEEAEAQKRQAQEEAERLRRQVQDESQRKRQAEVELASRVKAEAEAAREKQRALQALEELRLQAEEAERRLRQAEVERARQVQVALETAQRSAEAELQSKRASFAEKTAQLERSLQEEHVAVAQLREEAERRAQQQAEAERAREEAERELERWQLKANEALRLRLQAEEVAQQKSLAQAEAEKQKEEAEREARRRGKAEEQAVRQRELAEQELEKQRQLAEGTAQQRLAAEQELIRLRAETEQGEQQRQLLEEELARLQREAAAATQKRQELEAELAKVRAEMEVLLASKARAEEESRSTSEKSKQRLEAEAGRFRELAEEAARLRALAEEAKRQRQLAEEDAARQRAEAERVLAEKLAAIGEATRLKTEAEIALKEKEAENERLRRLAEDEAFQRRRLEEQAAQHKADIEERLAQLRKASDSELERQKGLVEDTLRQRRQVEEEILALKASFEKAAAGKAELELELGRIRSNAEDTLRSKEQAELEAARQRQLAAEEERRRREAEERVQKSLAAEEEAARQRKAALEEVERLKAKVEEARRLRERAEQESARQLQLAQEAAQKRLQAEEKAHAFAVQQKEQELQQTLQQEQSVLDQLRGEAEAARRAAEEAEEARVQAEREAAQSRRQVEEAERLKQSAEEQAQARAQAQAAAEKLRKEAEQEAARRAQAEQAALRQKQAADAEMEKHKKFAEQTLRQKAQVEQELTTLRLQLEETDHQKNLLDEELQRLKAEATEAARQRSQVEEELFSVRVQMEELSKLKARIEAENRALILRDKDNTQRFLQEEAEKMKQVAEEAARLSVAAQEAARLRQLAEEDLAQQRALAEKMLKEKMQAVQEATRLKAEAELLQQQKELAQEQARRLQEDKEQMAQQLAEETQGFQRTLEAERQRQLEMSAEAERLKLRVAEMSRAQARAEEDAQRFRKQAEEIGEKLHRTELATQEKVTLVQTLEIQRQQSDHDAERLREAIAELEREKEKLQQEAKLLQLKSEEMQTVQQEQLLQETQALQQSFLSEKDSLLQRERFIEQEKAKLEQLFQDEVAKAQQLREEQQRQQQQMEQERQRLVASMEEARRRQHEAEEGVRRKQEELQQLEQQRRQQEELLAEENQRLREQLQLLEEQHRAALAHSEEVTASQVAATKTLPNGRDALDGPAAEAEPEHSFDGLRRKVSAQRLQEAGILSAEELQRLAQGHTTVDELARREDVRHYLQGRSSIAGLLLKATNEKLSVYAALQRQLLSPGTALILLEAQAASGFLLDPVRNRRLTVNEAVKEGVVGPELHHKLLSAERAVTGYKDPYTGQQISLFQAMQKGLIVREHGIRLLEAQIATGGVIDPVHSHRVPVDVAYRRGYFDEEMNRVLADPSDDTKGFFDPNTHENLTYLQLLERCVEDPETGLCLLPLTDKAAKGGELVYTDSEARDVFEKATVSAPFGKFQGKTVTIWEIINSEYFTAEQRRDLLRQFRTGRITVEKIIKIIITVVEEQEQKGRLCFEGLRSLVPAAELLESRVIDRELYQQLQRGERSVRDVAEVDTVRRALRGANVIAGVWLEEAGQKLSIYNALKKDLLPSDMAVALLEAQAGTGHIIDPATSARLTVDEAVRAGLVGPEFHEKLLSAEKAVTGYRDPYTGQSVSLFQALKKGLIPREQGLRLLDAQLSTGGIVDPSKSHRVPLDVACARGCLDEETSRALSAPRADAKAYSDPSTGEPATYGELQQRCRPDQLTGLSLLPLSEKAARARQEELYSELQARETFEKTPVEVPVGGFKGRTVTVWELISSEYFTAEQRQELLRQFRTGKVTVEKVIKILITIVEEVETLRQERLSFSGLRAPVPASELLASGVLSRAQFEQLKDGKTTVKDLSELGSVRTLLQGSGCLAGIYLEDTKEKVSIYEAMRRGLLRATTAALLLEAQAATGFLVDPVRNQRLYVHEAVKAGVVGPELHEQLLSAEKAVTGYRDPYSGSTISLFQAMQKGLVLRQHGIRLLEAQIATGGIIDPVHSHRVPVDVAYQRGYFSEEMNRVLADPSDDTKGFFDPNTHENLTYRQLLERCVEDPETGLRLLPLKGAEKAEVVETTQVYTEEETRRAFEETQIDIPGGGSHGGSTMSLWEVMQSDLIPEEQRAQLMADFQAGRVTKERMIIIIIEIIEKTEIIRQQGLASYDYVRRRLTAEDLFEARIISLETYNLLREGTRSLREALEAESAWCYLYGTGSVAGVYLPGSRQTLSIYQALKKGLLSAEVARLLLEAQAATGFLLDPVKGERLTVDEAVRKGLVGPELHDRLLSAERAVTGYRDPYTEQTISLFQAMKKELIPTEEALRLLDAQLATGGIVDPRLGFHLPLEVAYQRGYLNKDTHDQLSEPSEVRSYVDPSTDERLSYTQLLRRCRRDDGTGQLLLPLSDARKLTFRGLRKQITMEELVRSQVMDEATALQLREGLTSIEEVTKNLQKFLEGTSCIAGVFVDATKERLSVYQAMKKGIIRPGTAFELLEAQAATGYVIDPIKGLKLTVEEAVRMGIVGPEFKDKLLSAERAVTGYKDPYSGKLISLFQAMKKGLILKDHGIRLLEAQIATGGIIDPEESHRLPVEVAYKRGLFDEEMNEILTDPSDDTKGFFDPNTEENLTYLQLMERCITDPQTGLCLLPLKEKKRERKTSSKSSVRKRRVVIVDPETGKEMSVYEAYRKGLIDHQTYLELSEQECEWEEITISSSDGVVKSMIIDRRSGRQYDIDDAIAKNLIDRSALDQYRAGTLSITEFADMLSGNAGGFRSRSSSVGSSSSYPISPAVSRTQLASWSDPTEETGPVAGILDTETLEKVSITEAMHRNLVDNITGQRLLEAQACTGGIIDPSTGERFPVTDAVNKGLVDKIMVDRINLAQKAFCGFEDPRTKTKMSAAQALKKGWLYYEAGQRFLEVQYLTGGLIEPDTPGRVPLDEALQRGTVDARTAQKLRDVGAYSKYLTCPKTKLKISYKDALDRSMVEEGTGLRLLEAAAQSTKGYYSPYSVSGSGSTAGSRTGSRTGSRAGSRRGSFDATGSGFSMTFSSSSYSSSGYGRRYASGSSASLGGPESAVA

SEQ ID NO: 355 - protein, 712 aa, Homo sapiens
MDAGVTESGLNVTLTIRLLMHGKEVGSIIGKKGESVKRIREESGARINISEGNCPERIITLTGPTNAIFKAFAMIIDKLEEDINSSMTNSTAASRPPVTLRLVVPATQCGSLIGKGGCKIKEIRESTGAQVQVAGDMLPNSTERAITIAGVPQSVTECVKQICLVMLETLSQSPQGRVMTIPYQPMPASSPVICAGGQDRCSDAAGYPHATHDLEGPPLDAYSIQGQHTISPLDLAKLNQVARQQSHFAMMHGGTGFAGIDSSSPEVKGYWASLDASTQTTHELTIPNNLIGCIIGRQGANINEIRQMSGAQIKIANPVEGSSGRQVTITGSAASISLAQYLINARLSSEKGMGCSMDAGVTESGLNVTLTIRLLMHGKEVGSIIGKKGESVKRIREESGARINISEGNCPERIITLTGPTNAIFKAFAMIIDKLEEDINSSMTNSTAASRPPVTLRLVVPATQCGSLIGKGGCKIKEIRESTGAQVQVAGDMLPNSTERAITIAGVPQSVTECVKQICLVMLETLSQSPQGRVMTIPYQPMPASSPVICAGGQDRCSDAAGYPHATHDLEGPPLDAYSIQGQHTISPLDLAKLNQVARQQSHFAMMHGGTGFAGIDSSSPEVKGYWASLDASTQTTHELTIPNNLIGCIIGRQGANINEIRQMSGAQIKIANPVEGSSGRQVTITGSAASISLAQYLINARLSSEKGMGCS

SEQ ID NO: 356 - protein, 764 aa, Homo sapiens
MLLFVLTCLLAVFPAISTKSPIFGPEEVNSVEGNSVSITCYYPPTSVNRHTRKYWCRQGARGGCITLISSEGYVSSKYAGRANLTNFPENGTFVVNIAQLSQDDSGRYKCGLGINSRGLSFDVSLEVSQGPGLLNDTKVYTVDLGRTVTINCPFKTENAQKRKSLYKQIGLYPVLVIDSSGYVNPNYTGRIRLDIQGTGQLLFSVVINQLRLSDAGQYLCQAGDDSNSNKKNADLQVLKPEPELVYEDLRGSVTFHCALGPEVANVAKFLCRQSSGENCDVVVNTLGKRAPAFEGRILLNPQDKDGSFSVVITGLRKEDAGRYLCGAHSDGQLQEGSPIQAWQLFVNEESTIPRSPTVVKGVAGGSVAVLCPYNRKESKSIKYWCLWEGAQNGRCPLLVDSEGWVKAQYEGRLSLLEEPGNGTFTVILNQLTSRDAGFYWCLTNGDTLWRTTVEIKIIEGEPNLKVPGNVTAVLGETLKVPCHFPCKFSSYEKYWCKWNNTGCQALPSQDEGPSKAFVNCDENSRLVSLTLNLVTRADEGWYWCGVKQGHFYGETAAVYVAVEERKAAGSRDVSLAKADAAPDEKVLDSGFREIENKAIQDPRLFAEEKAVADTRDQADGSRASVDSGSSEEQGGSSRALVSTLVPLGLVLAVGAVAVGVARARHRKNVDRVSIRSYRTDISMSDFENSREFGANDNMGASSITQETSLGGKEEFVATTESTTETKEPKKAKRSSKEEAEMAYKDFLLQSSTVAAEAQDGPQEA

SEQ ID NO: 357 - protein, 146 aa, Homo sapiens
MRLLQLLFRASPATLLLVLCLQLGANKAQDNTRKIIIKNFDIPKSVRPNDEVTAVLAVQTELKECMVVKTYLISSIPLQGAFNYKYTACLCDDNPKTFYWDFYTNRTVQIAAVVDVIRELGICPDDAAVIPIKNNRFYTIEILKVE

SEQ ID NO: 358 - protein, 219 aa, Homo sapiens
MKLLLWACIVCVAFARKRRFPFIGEDDNDDGHPLHPSLNIPYGIRNLPPPLYYRPVNTVPSYPGNTYTDTGLPSYPWILTSPGFPYVYHIRGFPLATQLNVPPLPPRGFPFVPPSRFFSAAAAPAAPPIAAEPAAAAPLTATPVAAEPAAGAPVAAEPAAEAPVGAEPAAEAPVAAEPAAEAPVGVEPAAEEPSPAEPATAKPAAPEPHPSPSLEQANQ

SEQ ID NO: 359 - protein, 134 aa, Homo sapiens
MLLVLLSVVLLALSSAQSTDNDVNYEDFTFTIPDVEDSSQRPDQGPQRPPPEGLLPRPPGDSGNQDDGPQQRPPKPGGHHRHPPPPPFQNQQRPPRRGHRQLSLPRFPSVSLQEASSFFQRDRPARHPQEQPLW

SEQ ID NO: 360 - protein, 710 aa, Homo sapiens
MLSLQYPDVYRDETAVQDYHGHKICDPYAWLEDPDSEQTKAFVEAQNKITVPFLEQCPIRGLYKERMTELYDYPKYSCHFKKGKRYFYFYNTGLQNQRVLYVQDSLEGEARVFLDPNILSDDGTVALRGYAFSEDGEYFAYGLSASGSDWVTIKFMKVDGAKELPDVLERVKFSCMAWTHDGKGMFYNSYPQQDGKSDGTETSTNLHQKLYYHVLGTDQSEDILCAEFPDEPKWMGGAELSDDGRYVLLSIREGCDPVNRLWYCDLQQESSGIAGILKWVKLIDNFEGEYDYVTNEGTVFTFKTNRQSPNYRVINIDFRDPEESKWKVLVPEHEKDVLEWIACVRSNFLVLCYLHDVKNILQLHDLTTGALLKTFPLDVGSIVGYSGQKKDTEIFYQFTSFLSPGIIYHCDLTKEELEPRVFREVTVKGIDASDYQTVQIFYPSKDGTKIPMFIVHKKGIKLDGSHPAFLYGYGGFNISITPNYSVSRLIFVRHMGGILAVANIRGGGEYGETWHKGGILANKQNCFDDFQCAAEYLIKEGYTSPKRLTINGGSNGGLLVAACANQRPDLFGCVIAQVGVMDMLKFHKYTIGHAWTTDYGCSDSKQHFEWLVKYSPLHNVKLPEADDIQYPSMLLLTADHDDRVVPLHSLKFIATLQYIVGRSRKQSNPLLIHVDTKAGHGAGKPTAKVIEEVSDMFAFIARCLNVDWIP

SEQ ID NO: 361 - protein, 343 aa, Homo sapiens
MAQKGVLGPGQLGAVAILLYLGLLRSGTGAEGAEAPCGVAPQARITGGSSAVAGQWPWQVSITYEGVHVCGGSLVSEQWVLSAAHCFPSEHHKEAYEVKLGAHQLDSYSEDAKVSTLKDIIPHPSYLQEGSQGDIALLQLSRPITFSRYIRPICLPAANASFPNGLHCTVTGWGHVAPSVSLLTPKPLQQLEVPLISRETCNCLYNIDAKPEEPHFVQEDMVCAGYVEGGKDACQGDSGGPLSCPVEGLWYLTGIVSWGDACGARNRPGVYTLASSYASWIQSKVTELQPRVVPQTQESQPDSNLCGSHLAFSSAPAQGLLRPILFLPLGLALGLLSPWLSEH

SEQ ID NO: 362 - protein, 239 aa, Homo sapiens
MAKPCGVRLSGEARKQVEVFRQNLFQEAEEFLYRFLPQKIIYLNQLLQEDSLNVADLTSLRAPLDIPIPDPPPKDDEMETDKQEKKEVHKCGFLPGNEKVLSLLALVKPEVWTLKEKCILVITWIQHLIPKIEDGNDFGVAIQEKVLERVNAVKTKVEAFQTTISKYFSERGDAVAKASKETHVMDYRALVHERDEAAYGELRAMVLDLRAFYAELYHIISSNLEKIVNPKGEEKPSMY

SEQ ID NO: 363 - protein, 261 aa, Homo sapiens
MSRRYDSRTTIFSPEGRLYQVEYAMEAIGHAGTCLGILANDGVLLAAERRNIHKLLDEVFFSEKIYKLNEDMACSVAGITSDANVLTNELRLIAQRYLLQYQEPIPCEQLVTALCDIKQAYTQFGGKRPFGVSLLYIGWDKHYGFQLYQSDPSGNYGGWKATCIGNNSAAAVSMLKQDYKEGEMTLKSALALAIKVLNKTMDVSKLSAEKVEIATLTRENGKTVIRVLKQKEVEQLIKKHEEEEAKAEREKKEKEQKEKDK

SEQ ID NO: 364 - protein, 248 aa, Homo sapiens
MSYDRAITVFSPDGHLFQVEYAQEAVKKGSTAVGVRGRDIVVLGVEKKSVAKLQDERTVRKICALDDNVCMAFAGLTADARIVINRARVECQSHRLTVEDPVTVEYITRYIASLKQRYTQSNGRRPFGISALIVGFDFDGTPRLYQTDPSGTYHAWKANAIGRGAKSVREFLEKNYTDEAIETDDLTIKLVIKALLEVVQSGGKNIELAVMRRDQSLKILNPEEIEKYVAEIEKEKEENEKKKQKKAS

SEQ ID NO: 365 - protein, 234 aa, Homo sapiens
MAERGYSFSLTTFSPSGKLVQIEYALAAVAGGAPSVGIKAANGVVLATEKKQKSILYDERSVHKVEPITKHIGLVYSGMGPDYRVLVHRARKLAQQYYLVYQEPIPTAQLVQRVASVMQEYTQSGGVRPFGVSLLICGWNEGRPYLFQSDPSGAYFAWKATAMGKNYVNGKTFLEKRYNEDLELEDAIHTAILTLKESFEGQMTEDNIEVGICNEAGFRRLTPTEVKDYLAAIA

SEQ ID NO: 366 - protein, 169 aa, Homo sapiens
MASKRALVILAKGAEEMETVIPVDVMRRAGIKVTVAGLAGKDPVQCSRDVVICPDASLEDAKKESAAVKEILKEQENRKGLIAAICAGPTALLAHEIGFGSKVTTHPLAKDKMMNGGHYTYSENRVEKDGLILTSRGPGTSFEFALAIVEALNGKEVAAQVKAPLVLKD

SEQ ID NO: 367 - protein, 508 aa, Homo sapiens
MLRRALLCLAVAALVRADAPEEEDHVLVLRKSNFAEALAAHKYLLVEFYAPWCGHCKALAPEYAKAAGKLKAEGSEIRLAKVDATEESDLAQQYGVRGYPTIKFFRNGDTASPKEYTAGREADDIVNWLKKRTGPAATTLPDGAAAESLVESSEVAVIGFFKDVESDSAKQFLQAAEAIDDIPFGITSNSDVFSKYQLDKDGVVLFKKFDEGRNNFEGEVTKENLLDFIKHNQLPLVIEFTEQTAPKIFGGEIKTHILLFLPKSVSDYDGKLSNFKTAAESFKGKILFIFIDSDHTDNQRILEFFGLKKEECPAVRLITLEEEMTKYKPESEELTAERITEFCHRFLEGKIKPHLMSQELPEDWDKQPVKVLVGKNFEDVAFDEKKNVFVEFYAPWCGHCKQLAPIWDKLGETYKDHENIVIAKMDSTANEVEAVKVHSFPTLKFFPASADRTVIDYNGERTLDGFKKFLESGGQDGAGDDDDLEDLEEAEEPDMEEDDDQKAVKDEL

SEQ ID NO: 368 - protein, 119 aa, Homo sapiens
MEFGLSWVFLVAILKGVQCEVQLVESGGGLVQPGRSLRLSCTASGFTFGDYAMSWVRQAPGKGLEWVGFIRSKAYGGTTEYAASVKGRFTISRDDSKSIAYLQMNSLKTEDTAVYYCTR

SEQ ID NO: 369 - protein, 117 aa, Homo sapiens
MKHLWFFLLLVAAPRWVLSQVQLQESGPGLVKPSGTLSLTCAVSGGSISSSNWWSWVRQPPGKGLEWIGEIYHSGSTNYNPSLKSRVTISVDKSKNQFSLKLSSVTAADTAVYYCAR

SEQ ID NO: 370 - protein, 120 aa, Homo sapiens
MRLPAQLLGLLMLWVSGSSGDIVMTQSPLSLPVTPGEPASISCRSSQSLLHSNGYNYLDWYLQKPGQSPQLLIYLGSNRASGVPDRFSGSGSGTDFTLKISRVEAEDVGVYYCMQALQTP

SEQ ID NO: 371 - protein, 120 aa, Homo sapiens
MRLPAQLLGLLMLWVPGSSGDVVMTQSPLSLPVTLGQPASISCRSSQSLVYSDGNTYLNWFQQRPGQSPRRLIYKVSNRDSGVPDRFSGSGSGTDFTLKISRVEAEDVGVYYCMQGTHWP

SEQ ID NO: 372 - protein, 120 aa, Homo sapiens
MRLLAQLLGLLMLWVPGSSGDIVMTQTPLSSPVTLGQPASISFRSSQSLVHSDGNTYLSWLQQRPGQPPRLLIYKVSNRFSGVPDRFSGSGAGTDFTLKISRVEAEDVGVYYCTQATQFP

SEQ ID NO: 373 - protein, 112 aa, Homo sapiens
MAWTPLWLTLLTLCIGSVVSSELTQDPAVSVALGQTVRITCQGDSLRSYYASWYQQKPGQAPVLVIYGKNNRPSGIPDRFSGSSSGNTASLTITGAQAEDEADYYCNSRDSS

SEQ ID NO: 374 - protein, 371 aa, Homo sapiens
MAELQEVQITEEKPLLPGQTPEAAKEAELAARILLDQGQTHSVETPYGSVTFTVYGTPKPKRPAILTYHDVGLNYKSCFQPLFQFEDMQEIIQNFVRVHVDAPGMEEGAPVFPLGYQYPSLDQLADMIPCVLQYLNFSTIIGVGVGAGAYILARYALNHPDTVEGLVLINIDPNAKGWMDWAAHKLTGLTSSIPEMILGHLFSQEELSGNSELIQKYRNIITHAPNLDNIELYWNSYNNRRDLNFERGGDITLRCPVMLVVGDQAPHEDAVVECNSKLDPTQTSFLKMADSGGQPQLTQPGKLTEAFKYFLQGMGYMASSCMTRLSRSRTASLTSAASVDGNRSRSRTLSQSSESGTLSSGPPGHTMEVSC

SEQ ID NO: 375 - protein, 105 aa, Homo sapiens
MAKISSPTETERCIESLIAVFQKYAGKDGYNYTLSKTEFLSFMNTELAAFTKNQKDPGVLDRMMKKLDTNSDGQLDFSEFLNLIGGLAMACHDSFLKAVPSQKRT

SEQ ID NO: 376 - protein, 101 aa, Homo sapiens
MACPLEKALDVMVSTFHKYSGKEGDKFKLNKSELKELLTRELPSFLGKRTDEAAFQKLMSNLDSNRDNEVDFQEYCVFLSCIAMMCNEFFEGFPDKQPRKK

SEQ ID NO: 377 - protein, 95 aa, Homo sapiens
MTELETAMGMIIDVFSRYSGSEGSTQTLTKGELKVLMEKELPGFLQSGKDKDAVDKLLKDLDANGDAQVDFSEFIVFVAAITSACHKYFEKAGLK

SEQ ID NO: 378 - protein, 302 aa, Homo sapiens
MVWFLDFPNSMAPKRQSPLPLQKKKPRPPPALGLEETSASAGLPKKGEKEQQEAIEHIDEVQNEIDRLNEQDSEEILKVEQKYNKLRQPFFQKRSELIAKIPNFGVTTFVNHPQVSSLLGEEDEEALHYLTKVEVTEFEDIKSGYRIDFYFDENPYFENKVFSKEFHLNESGDPSSKSTKIKWKSGKDVTKRSSQTQNKASRKRQHEEPESFFTWFTDHSDAGADELEEVIKDDIWPNPLQYYLVPDMDDEEGGEDDDDDDDDGDEGEEELEDIDEGDEDEGEEDEDDDEGEEGEEDEGEDD

SEQ ID NO: 379 - protein, 693 aa, Homo sapiens
MAALGVQSINWQTAFNRQAHHTDKFSSQELILRRGQNFQVLMIMNKGLGSNERLEFIVSTGPYPSESAMTKAVFPLSNGSSGGWSAVLQASNGNTLTISISSPASAPIGRYTMALQIFSQGGISSVKLGTFILLFNPWLNVDSVFMGNHAEREEYVQEDAGIIFVGSTNRIGMIGWNFGQFEEDILSICLSILDRSLNFRRDAATDVASRNDPKYVGRVLSAMINSNDDNGVLAGNWSGTYTGGRDPRSWNGSVEILKNWKKSGFSPVRYGQCWVFAGTLNTALRSLGIPSRVITNFNSAHDTDRNLSVDVYYDPMGNPLDKGSDSVWNFHVWNEGWFVRSDLGPSYGGWQVLDATPQERSQGVFQCGPASVIGVREGDVQLNFDMPFIFAEVNADRITWLYDNTTGKQWKNSVNSHTIGRYISTKAVGSNARMDVTDKYKYPEGSDQERQVFQKALGKLKPNTPFAATSSMGLETEEQEPSIIGKLKVAGMLAVGKEVNLVLLLKNLSRDTKTVTVNMTAWTIIYNGTLVHEVWKDSATMSLDPEEEAEHPIKISYAQYEKYLKSDNMIRITAVCKVPDESEVVVERDIILDNPTLTLEVLNEARVRKPVNVQMLFSNPLDEPVRDCVLMVEGSGLLLGNLKIDVPTLGPKEGSRVRFDILPSRSGTKQLLADFSCNKFPAIKAMLSIDVAE

SEQ ID NO: 380 - protein, 111 aa, Homo sapiens
MSDAAVDTSSEITTKDLKEKKEVVEEAENGRDAPANGNAENEENGEQEADNEVDEEEEEGGEEEEEEEEGDGEEEDGDEDEEAESATGKRAAEDDEDDDVDTKKQKTDEDD

SEQ ID NO: 381 - protein, 919 aa, Homo sapiens
MWLAAAAPSLARRLLFLGPPPPPLLLLVFSRSSRRRLHSLGLAAMPEKRPFERLPADVSPINYSLCLKPDLLDFTFEGKLEAAAQVRQATNQIVMNCADIDIITASYAPEGDEEIHATGFNYQNEDEKVTLSFPSTLQTGTGTLKIDFVGELNDKMKGFYRSKYTTPSGEVRYAAVTQFEATDARRAFPCWDEPAIKATFDISLVVPKDRVALSNMNVIDRKPYPDDENLVEVKFARTPVMSTYLVAFVVGEYDFVETRSKDGVCVRVYTPVGKAEQGKFALEVAAKTLPFYKDYFNVPYPLPKIDLIAIADFAAGAMENWGLVTYRETALLIDPKNSCSSSRQWVALVVGHELAHQWFGNLVTMEWWTHLWLNEGFASWIEYLCVDHCFPEYDIWTQFVSADYTRAQELDALDNSHPIEVSVGHPSEVDEIFDAISYSKGASVIRMLHDYIGDKDFKKGMNMYLTKFQQKNAATEDLWESLENASGKPIAAVMNTWTKQMGFPLIYVEAEQVEDDRLLRLSQKKFCAGGSYVGEDCPQWMVPITISTSEDPNQAKLKILMDKPEMNVVLKNVKPDQWVKLNLGTVGFYRTQYSSAMLESLLPGIRDLSLPPVDRLGLQNDLFSLARAGIISTVEVLKVMEAFVNEPNYTVWSDLSCNLGILSTLLSHTDFYEEIQEFVKDVFSPIGERLGWDPKPGEGHLDALLRGLVLGKLGKAGHKATLEEARRRFKDHVEGKQILSADLRSPVYLTVLKHGDGTTLDIMLKLHKQADMQEEKNRIERVLGATLLPDLIQKVLTFALSEEVRPQDTVSVIGGVAGGSKHGRKAAWKFIKDNWEELYNRYQGGFLISRLIKLSVEGFAVDKMAGEVKAFFESHPAPSAERTIQQCCENILLNAAWLKRDAESIHQYLLQRKASPPTV

SEQ ID NO: 382 - protein, 531 aa, Homo sapiens
MSKPHSEAGTAFIQTQQLHAAMADTFLEHMCRLDIDSPPITARNTGIICTIGPASRSVETLKEMIKSGMNVARLNFSHGTHEYHAETIKNVRTATESFASDPILYRPVAVALDTKGPEIRTGLIKGSGTAEVELKKGATLKITLDNAYMEKCDENILWLDYKNICKVVEVGSKIYVDDGLISLQVKQKGADFLVTEVENGGSLGSKKGVNLPGAAVDLPAVSEKDIQDLKFGVEQDVDMVFASFIRKASDVHEVRKVLGEKGKNIKIISKIENHEGVRRFDEILEASDGIMVARGDLGIEIPAEKVFLAQKMMIGRCNRAGKPVICATQMLESMIKKPRPTRAEGSDVANAVLDGADCIMLSGETAKGDYPLEAVRMQHLIAREAEAAIYHLQLFEELRRLAPITSDPTEATAVGAVEASFKCCSGAIIVLTKSGRSAHQVARYRPRAPIIAVTRNPQTARQAHLYRGIFPVLCKDPVQEAWAEDVDLRVNFAMNVGKARGFFKKGDVVIVLTGWRPGSGFTNTMRVVPVP

SEQ ID NO: 383 - protein, 1657 aa, Homo sapiens
MSAADEVDGLGVARPHYGSVLDNERLTAEEMDERRRQNVAYEYLCHLEEAKRWMEACLGEDLPPTTELEEGLRNGVYLAKLGNFFSPKVVSLKKIYDREQTRYKATGLHFRHTDNVIQWLNAMDEIGLPKIFYPETTDIYDRKNMPRCIYCIHALSLYLFKLGLAPQIQDLYGKVDFTEEEINNMKTELEKYGIQMPAFSKIGGILANELSVDEAALHAAVIAINEAIDRRIPADTFAALKNPNAMLVNLEEPLASTYQDILYQAKQDKMTNAKNRTENSERERDVYEELLTQAEIQGNINKVNTFSALANIDLALEQGDALALFRALQSPALGLRGLQQQNSDWYLKQLLSDKQQKRQSGQTDPLQKEELQSGVDAANSAAQQYQRRLAAVALINAAIQKGVAEKTVLELMNPEAQLPQVYPFAADLYQKELATLQRQSPEHNLTHPELSVAVEMLSSVALINRALESGDVNTVWKQLSSSVTGLTNIEEENCQRYLDELMKLKAQAHAENNEFITWNDIQACVDHVNLVVQEEHERILAIGLINEALDEGDAQKTLQALQIPAAKLEGVLAEVAQHYQDTLIRAKREKAQEIQDESAVLWLDEIQGGIWQSNKDTQEAQKFALGIFAINEAVESGDVGKTLSALRSPDVGLYGVIPECGETYHSDLAEAKKKKLAVGDNNSKWVKHWVKGGYYYYHNLETQEGGWDEPPNFVQNSMQLSREEIQSSISGVTAAYNREQLWLANEGLITRLQARCRGYLVRQEFRSRMNFLKKQIPAITCIQSQWRGYKQKKAYQDRLAYLRSHKDEVVKIQSLARMHQARKRYRDRLQYFRDHINDIIKIQAFIRANKARDDYKTLINAEDPPMVVVRKFVHLLDQSDQDFQEELDLMKMREEVITLIRSNQQLENDLNLMDIKIGLLVKNKITLQDVVSHSKKLTKKNKEQLSDMMMINKQKGGLKALSKEKREKLEAYQHLFYLLQTNPTYLAKLIFQMPQNKSTKFMDSVIFTLYNYASNQREEYLLLRLFKTALQEEIKSKVDQIQEIVTGNPTVIKMVVSFNRGARGQNALRQILAPVVKEIMDDKSLNIKTDPVDIYKSWVNQMESQTGEASKLPYDVTPEQALAHEEVKTRLDSSIRNMRAVTDKFLSAIVSSVDKIPYGMRFIAKVLKDSLHEKFPDAGEDELLKIIGNLLYYRYMNPAIVAPDAFDIIDLSAGGQLTTDQRRNLGSIAKMLQHAASNKMFLGDNAHLSIINEYLSQSYQKFRRFFQTACDVPELQDKFNVDEYSDLVTLTKPVIYISIGEIINTHTLLLDHQDAIAPEHNDPIHELLDDLGEVPTIESLIGESSGNLNDPNKEALAKTEVSLTLTNKFDVPGDENAEMDARTILLNTKRLIVDVIRFQPGETLTEILETPATSEQEAEHQRAMQRRAIRDAKTPDKMKKSKSVKEDSNLTLQEKKEKIQTGLKKLTELGTVDPKNKYQELINDIARDIRNQRRYRQRRKAELVKLQQTYAALNSKATFYGEQVDYYKSYIKTCLDNLASKGKVSKKPREMKGKKSKKISLKYTAARLHEKGVLLEIEDLQVNQFKNVIFEISPTEEVGDFEVKAKFMGVQMETFMLHYQDLLQLQYEGVAVMKLFDRAKVNVNLLIFLLNKKFYGK

SEQ ID NO: 384 - protein, 231 aa, Homo sapiens
MAKWVPALLLRRVPLFSLRFRPASSTFLPVLAATEPAVSVPSGDLSMPVKTRAEGEDDGFGEAGDPRRLLERPWRFRGCLPGKGNRDVGFEGTEGPTSTRPEWVWSCRCCLGCRASTRERVTSPVRAAGPQPRFTDRETEAAAGTLAHMGFAPPTSFSHFTDQELRDCSSLECLGVVEGDPHVLCSTLSLSRPSPSATLTLLLASSCLLAPAPPSFILLLFTLIAPDLPHS

SEQ ID NO: 385 - protein, 200 aa, Homo sapiens
MAKKTYDLLFKLLLIGDSGVGKTCVLFRFSDDAFNTTFISTIGIDFKIKTVELQGKKIKLQIWDTAGQERFHTITTSYYRGAMGIMLVYDITNGKSFENISKWLRNIDEHANEDVERMLLGNKCDMDDKRVVPKGKGEQIAREHGIRFFETSAKANINIEKAFLTLAEDILRKTPVKEPNSENVDISSGGGVTGWKSKCC

SEQ ID NO: 386 - protein, 205 aa, Homo sapiens
MSSMNPEYDYLFKLLLIGDSGVGKSCLLLRFADDTYTESYISTIGVDFKIRTIELDGKTIKLQIWDTAGQERFRTITSSYYRGAHGIIVVYDVTDQESFNNVKQWLQEIDRYASENVNKLLVGNKCDLTTKKVVDYTTAKEFADSLGIPFLETSAKNATNVEQSFMTMAAEIKKRMGPGATAGGAEKSNVKIQSTPVKQSGGGCC

SEQ ID NO: 387 - protein, 350 aa, Homo sapiens
MAVFVVLLALVAGVLGNEFSILKSPGSVVFRNGNWPIPGERIPDVAALSMGFSVKEDLSWPGLAVGNLFHRPRATVMVMVKGVNKLALPPGSVISYPLENAVPFSLDSVANSIHSLFSEETPVVLQLAPSEERVYMVGKANSVFEDLSVTLRQLRNRLFQENSVLSSLPLNSLSRNNEVDLLFLSELQVLHDISSLLSRHKHLAKDHSPDLYSLELAGLDEIGKRYGEDSEQFRDASKILVDALQKFADDMYSLYGGNAVVELVTVKSFDTSLIRKTRTILEAKQAKNPASPYNLAYKYNFEYSVVFNMVLWIMIALALAVIITSYNIWNMDPGYDSIIYRMTNQKIRMD

SEQ ID NO: 388 - protein, 331 aa, Homo sapiens
MARGGRGRRLGLALGLLLALVLAPRVLRAKPTVRKERVVRPDSELGERPPEDNQSFQYDHEAFLGKEDSKTFDQLTPDESKERLGKIVDRIDNDGDGFVTTEELKTWIKRVQKRYIFDNVAKVWKDYDRDKDDKISWEEYKQATYGYYLGNPAEFHDSSDHHTFKKMLPRDERRFKAADLNGDLTATREEFTAFLHPEEFEHMKEIVVLETLEDIDKNGDGFVDQDEYIADMFSHEENGPEPDWVLSEREQFNEFRDLNKDGKLDKDEIRHWILPQDYDHAQAEARHLVYESDKNKDEKLTKEEILENWNMFVGSQATNYGEDLTKNHDEL

SEQ ID NO: 389 - protein, 294 aa, Homo sapiens
MQPRRQRLPAPWSGPRGPRPTAPLLALLLLLAPVAAPAGSGDPDDPGQPQDAGVPRRLLQQAARAALHFFNFRSGSPSALRVLAEVQEGRAWINPKEGCKVHVVFSTERYNPESLLQEGEGRLGKCSARVFFKNQKPRPTINVTCTRLIEKKKRQQEDYLLYKQMKQLKNPLEIVSIPDNHGHIDPSLRLIWDLAFLGSSYVMWEMTTQVSHYYLAQLTSVRQWKTNDDTIDFDYTVLLHELSTQEIIPCRIHLVWYPGKPLKVKYHCQELQTPEEASGTEEGSAVVPTELSNF

SEQ ID NO: 390 - protein, 201 aa, Homo sapiens
MKWVWALLLLAALGSGRAERDCRVSSFRVKENFDKARFSGTWYAMAKKDPEGLFLQDNIVAEFSVDETGQMSATAKGRVRLLNNWDVCADMVGTFTDTEDPAKFKMKYWGVASFLQKGNDDHWIVDTDYDTYAVQYSCRLLNLDGTCADSYSFVFSRDPNGLPPEAQKIVRQRQEELCLARQYRLIVHNGYCDGRSERNLL

SEQ ID NO: 391 - protein, 204 aa, Homo sapiens
MAEQEPTAEQLAQIAAENEEDEHSVNYKPPAQKSIQEIQELDKDDESLRKYKEALLGRVAVSADPNVPNVVVTGLTLVCSSAPGPLELDLTGDLESFKKQSFVLKEGVEYRIKISFRVNREIVSGMKYIQHTYRKGVKIDKTDYMVGSYGPRAEEYEFLTPVEEAPKGMLARGSYSIKSRFTDDDKTDHLSWEWNLTIKKDWKD

SEQ ID NO: 392 - protein, 201 aa, Homo sapiens
MTEKAPEPHVEEDDDDELDSKLNYKPPPQKSLKELQEMDKDDESLIKYKKTLLGDGPVVTDPKAPNVVVTRLTLVCESAPGPITMDLTGDLEALKKETIVLKEGSEYRVKIHFKVNRDIVSGLKYVQHTYRTGVKVDKATFMVGSYGPRPEEYEFLTPVEEAPKGMLARGTYHNKSFFTDDDKQDHLSWEWNLSIKKEWTE

SEQ ID NO: 393 - protein, 263 aa, Homo sapiens
MFRNQYDNDVTVWSPQGRIHQIEYAMEAVKQGSATVGLKSKTHAVLVALKRAQSELAAHQKKILHVDNHIGISIAGLTADARLLCNFMRQECLDSRFVFDRPLPVSRLVSLIGSKTQIPTQRYGRRPYGVGLLIAGYDDMGPHIFQTCPSANYFDCRAMSIGARSQSARTYLERHMSEFMECNLNELVKHGLRALRETLPAEQDLTTKNVSIGIVGKDLEFTIYDDDDVSPFLEGLEERPQRKAQPAQPADEPAEKADEPMEH

SEQ ID NO: 394 - protein, 261 aa, Homo sapiens; identical to SEQ ID NO: 363

SEQ ID NO: 395 - protein, 483 aa, Homo sapiens
MAQADIALIGLAVMGQNLILNMNDHGFVVCAFNRTVSKVDDFLANEAKGTKVVGAQSLKEMVSKLKKPRRIILLVKAGQAVDDFIEKLVPLLDTGDIIIDGGNSEYRDTTRRCRDLKAKGILFVGSGVSGGEEGARYGPSLMPGGNKEAWPHIKTIFQGIAAKVGTGEPCCDWVGDEGAGHFVKMVHNGIEYGDMQLICEAYHLMKDVLGMAQDEMAQAFEDWNKTELDSFLIEITANILKFQDTDGKHLLPKIRDSAGQKGTGKWTAISALEYGVPVTLIGEAVFARCLSSLKDERIQASKKLKGPQKFQFDGDKKSFLEDIRKALYASKIISYAQGFMLLRQAATEFGWTLNYGGIALMWRGGCIIRSVFLGKIKDAFDRNPELQNLLLDDFFKSAVENCQDSWRRAVSTGVQAGIPMPCFTTALSFYDGYRHEMLPASLIQAQRDYFGAHTYELLAKPGQFIHTNWTGHGGTVSSSSYNA

SEQ ID NO: 396 - protein, 174 aa, Homo sapiens
MAAAMVPGRSESWERGEPGRPALYFCGSIRGGREDRTLYERIVSRLRRFGTVLTEHVAAAELGARGEEAAGGDRLIHEQDLEWLQQADVVVAEVTQPSLGVGYELGRAVAFNKRILCLFRPQSGRVLSAMIRGAADGSRFQVWDYEEGEVEALLDRYFEADPPGQVAASPDPTT

SEQ ID NO: 397 - protein, 555 aa, Homo sapiens
MDVSSEHTKDPGGEGGDGESLAARPSKIKASSGPPTSPEPGELESEPEEEEEEQAASQGGTAADEQAEAPKGLTAAEAAGEEGPGEPGRPAEPQPEPEEPAEVGAEEPAQPEPGAGPEELEAEAGAEELEQAAEGKEVRFQASLPLTRIDEEEAAAAPEAETERVEGEEEDKEETQRDGAESKERDGEGRPAKSQEEGKRLYGRDEFEDLEWSEEVQKLQEQQLRSDLLDQYRSLLVERNRSQRYNLYLQHKIFEALRRKKGLEAAEVADRGAEAEAPEKEQAYLRHLGMLEELKKQQADDLQWYHQELGQLKRQCQEKLTRVEKEWRRFQALKKQVVMQAMGSCRMRGGRQAALREVEQIQALEDKKEKEMSAVRLENIQLKQSLVHFETRMRTQEDLTQGLLLIDFEQLKIENQTFNEKIEERNEELLKLRSKVTNSVQVITHVKEKLHFMDMENACKKTQLAEIEAQAALGRDILTKTKQAREGLRTDNIRLNQKCGLLGKDSLLRDLEEKVDKTELLHRRLESLKRHHASLTLSCRGVRQKIREAKAFLPS

SEQ ID NO: 398 - protein, 125 aa, Homo sapiens
MAVADLALIPDVDIDSDGVFKYVLIRVHSAPRSGAPAAESKEIVRGYKWAEYHADIYDKVSGDMQKQGCDCECLGGGRISHQSQDKKIHVYGYSMAYGPAQHAISTEKIKAKYPDYEVTWANDGY

SEQ ID NO: 399 - protein, 424 aa, Homo sapiens
MATPMVEDTSSFEEDQLASMSTEDITRATRLLDNEIRILKEDAQRTNLECDSYKEKIKENQEKIKLNKQLPYLVGNIVEILEMNPEDDAEEDGANIDLDSQRKGKCVVLKTSTRQTIFLPVVGLVDPDSLKPGDLVGVNKDSYLILDTLPSEYDSRVKAMEVDEKPTEDYNDIGGLEKQIQELVEAIVLPMTHKERFEKLGVRPPKGVLLYGPPGTGKTLMARACAAQTNATFLKLAGPQLVQMFIGDGAKLVRDAFQLAKEKAPCIIFIDEIDAIGTKRFDSEVSGDREVQRTMLELLNQLDGFSSDERIKVIAATNRADILDPALMRSGRLDRKIEFPHPTEEARARILQIHSRKMNVHPDVNFEELARSTDDFNGAQLKAVCVEAGMLALRRDATEVNHEDFNEGIIQVQAKKKASLNYYA

SEQ ID NO: 400 - protein, 386 aa, Homo sapiens
MFAEIQIQDKDRMGTAGKVIKCKAAVLWEQKQPFSIEEIEVAPPKTKEVRIKILATGICRTDDHVIKGTMVSKFPVIVGHEATGIVESIGEGVTTVKPGDKVIPLFLPQCRECNACRNPDGNLCIRSDITGRGVLADGTTRFTCKGKPVHHFMNTSTFTEYTVVDESSVAKIDDAAPPEKVCLIGCGFSTGYGAAVKTGKVKPGSTCVVFGLGGVGLSVIMGCKSAGASRIIGIDLNKDKFEKAMAVGATECISPKDSTKPISEVLSEMTGNNVGYTFEVIGHLETMIDALASCHMNYGTSVVVGVPPSAKMLTYDPMLLFTGRTWKGCVFGGLKSRDDVPKLVTEFLAKKFDLDQLITHVLPFKKISEGFELLNSGQSIRTVLTF

SEQ ID NO: 401 - protein, 323 aa, Homo sapiens
MDSKYQCVKLNDGHFMPVLGFGTYAPAEVPKSKALEATKLAIEAGFRHIDSAHLYNNEEQVGLAIRSKIADGSVKREDIFYTSKLWCNSHRPELVRPALERSLKNLQLDYVDLYLIHFPVSVKPGEEVIPKDENGKILFDTVDLCATWEAVEKCKDAGLAKSIGVSNFNRRQLEMILNKPGLKYKPVCNQVECHPYFNQRKLLDFCKSKDIVLVAYSALGSHREEPWVDPNSPVLLEDPVLCALAKKHKRTPALIALRYQLQRGVVVLAKSYNEQRIRQNVQVFEFQLTSEEMKAIDGLNRNVRYLTLDIFAGPPNYPFSDEY

SEQ ID NO: 402 - protein, 402 aa, Homo sapiens [sequence omitted]

SEQ ID NO: 403 - protein, 261 aa, Homo sapiens; identical to SEQ ID NO: 363

SEQ ID NO: 404 - protein, 91 aa, Homo sapiens
MKVSAAALAVILIATALCAPASASPYSSDTTPCCFAYIARPLPRAHIKEYFYTSGKCSNPAVVFVTRKNRQVCANPEKKWVREYINSLEMS

SEQ ID NO: 405 - protein, 868 aa, Homo sapiens
MATFISVQLKKTSEVDLAKPLVKFIQQTYPSGGEEQAQYCRAAEELSKLRRAAVGRPLDKHEGALETLLRYYDQICSIEPKFPFSENQICLTFTWKDAFDKGSLFGGSVKLALASLGYEKSCVLFNCAALASQIAAEQNLDNDEGLKIAAKHYQFASGAFLHIKETVLSALSREPTVDISPDTVGTLSLIMLAQAQEVFFLKATRDKMKDAIIAKLANQAADYFGDAFKQCQYKDTLPKEVFPVLAAKHCIMQANAEYHQSILAKQQKKFGEEIARLQHAAELIKTVASRYDEYVNVKDFSDKINRALAAAKKDNDFIYHDRVPDLKDLDPIGKATLVKSTPVNVPISQKFTDLFEKMVPVSVQQSLAAYNQRKADLVNRSIAQMREATTLANGVLASLNLPAAIEDVSGDTVPQSILTKSRSVIEQGGIQTVDQLIKELPELLQRNREILDESLRLLDEEEATDNDLRAKFKERWQRTPSNELYKPLRAEGTNFRTVLDKAVQADGQVKECYQSHRDTIVLLCKPEPELNAAIPSANPAKTMQGSEVVNVLKSLLSNLDEVKKEREGLENDLKSVNFDMTSKFLTALAQDGVINEEALSVTELDRVYGGLTTKVQESLKKQEGLLKNIQVSHQEFSKMKQSNNEANLREEVLKNLATAYDNFVELVANLKEGTKFYNELTEILVRFQNKCSDIVFARKTERDELLKDLQQSIAREPSAPSIPTPAYQSSPAGGHAPTPPTPAPRTMPPTKPQPPARPPPPVLPANRAPSATAPSPVGAGTAAPAPSQTPGSAPPPQAQGPPYPTYPGYPGYCQMPMPMGYNPYAYGQYNMPYPPVYHQSPGQAPYPGPQQPSYPFPQPPQQSYYPQQ

SEQ ID NO: 406 - protein, 114 aa, Homo sapiens
MVIRVYIASSSGSTAIKKKQQDVLGFLEANKIGFEEKDIAANEENRKWMRENVPENSRPATGYPLPPQIFNESQYRGDYDAFFEARENNAVYAFLGLTAPPGSKEAEVQAKQQA

SEQ ID NO: 407 - protein, 93 aa, Homo sapiens
MSGLRVYSTSVTGSREIKSQQSEVTRILDGKRIQYQLVDISQDNALRDEMRALAGNPKATPPQIVNGDQYCGDYELFVEAVEQNTLQEFLKLA

SEQ ID NO: 408 - protein, 205 aa, Homo sapiens
MTERRVPFSLLRGPSWDPFRDWYPHSRLFDQAFGLPRLPEEWSQWLGGSSWPGYVRPLPPAAIESPAVAAPAYSRALSRQLSSGVSEIRHTADRWRVSLDVNHFAPDELTVKTKDGVVEITGKHEERQDEHGYISRCFTRKYTLPPGVDPTQVSSSLSPEGTLTVEAPMPKLATQSNEITIPVTFESRAQLGGPEAAKSDETAAK

SEQ ID NO: 409 - protein, 116 aa, Homo sapiens; identical to SEQ ID NO: 10

SEQ ID NO: 410 - protein, 117 aa, Homo sapiens
MAWTVLLLGLLSHCTGSVTSYVLTQPPSVSVAPGQTARITCGGNNIGSKSVHWYQQKPGQAPVLVVYDDSDRPSGIPERFSGSNSGNTATLTISRVEAGDEADYYCQVWDSSSDHPT

SEQ ID NO: 411 - protein, 273 aa, Homo sapiens
MKKTQTWILTCIYLQLLLFNPLVKTEGICRNRVTNNVKDVTKLVANLPKDYMITLKYVPGMDVLPSHCWISEMVVQLSDSLTDLLDKFSNISEGLSNYSIIDKLVNIVDDLVECVKENSSKDLKKSFKSPEPRLFTPEEFFRIFNRSIDAFKDFVVASETSDCVVSSTLSPEKDSRVSVTKPFMLPPVAASSLRNDSSSSNRKAKNPPGDSSLHWAAMALPALFSLIIGFAFGALYWKKRQPSLTRAVENIQINEEDNEISMLQEKEREFQEV

SEQ ID NO: 412 - protein, 207 aa, Homo sapiens; identical to SEQ ID NO: 263

SEQ ID NO: 413 - protein, 455 aa, Homo sapiens
MGLSTVPDLLLPLVLLELLVGIYPSGVIGLVPHLGDREKRDSVCPQGKYIHPQNNSICCTKCHKGTYLYNDCPGPGQDTDCRECESGSFTASENHLRHCLSCSKCRKEMGQVEISSCTVDRDTVCGCRKNQYRHYWSENLFQCFNCSLCLNGTVHLSCQEKQNTVCTCHAGFFLRENECVSCSNCKKSLECTKLCLPQIENVKGTEDSGTTVLLPLVIFFGLCLLSLLFIGLMYRYQRWKSKLYSIVCGKSTPEKEGELEGTTTKPLAPNPSFSPTPGFTPTLGFSPVPSSTFTSSSTYTPGDCPNFAAPRREVAPPYQGADPILATALASDPIPNPLQKWEDSAHKPQSLDTDDPATLYAVVENVPPLRWKEFVRRLGLSDHEIDRLELQNGRCLREAQYSMLATWRRRTPRREATLELLGRVLRDMDLLGCLEDIEEALCGPAALPPAPSLLR

SEQ ID NO: 414 - protein, 501 aa, Homo sapiens
MAAASVTPPGSLELLQPGFSKTLLGTKLEAKYLCSACRNVLRRPFQAQCGHRYCSFCLASILSSGPQNCAACVHEGIYEEGISILESSSAFPDNAARREVESLPAVCPSDGCTWKGTLKEYESCHEGRCPLMLTECPACKGLVRLGEKERHLEHECPERSLSCRHCRAPCCGADVKAHHEVCPKFPLTCDGCGKKKIPREKFQDHVKTCGKCRVPCRFHAIGCLETVEGEKQQEHEVQWLREHLAMLLSSVLEAKPLLGDQSHAGSELLQRCESLEKKTATFENIVCVLNREVERVAMTAEACSRQHRLDQDKIEALSSKVQQLERSIGLKDLAMADLEQKVLEMEASTYDGVFIWKISDFARKRQEAVAGRIPAIFSPAFYTSRYGYKMCLRIYLNGDGTGRGTHLSLFFVVMKGPNDALLRWPFNQKVTLMLLDQNNREHVIDAFRPDVTSSSFQRPVNDMNIASGCPLFCPVSKMEAKNSYVRDDAIFIKAIVDLTGL

SEQ ID NO: 415 - protein, 22 aa, Homo sapiens
MNFLLSWVHWSLALLLYLHHAK

SEQ ID NO: 416 - protein, 1207 aa, Homo sapiens
MLLTLIILLPVVSKFSFVSLSAPQHWSCPEGTLAGNGNSTCVGPAPFLIFSHGNSIFRIDTEGTNYEQLVVDAGVSVIMDFHYNEKRIYWVDLERQLLQRVFLNGSRQERVCNIEKNVSGMAINWINEEVIWSNQQEGIITVTDMKGNNSHILLSALKYPANVAVDPVERFIFWSSEVAGSLYRADLDGVGVKALLETSEKITAVSLDVLDKRLFWIQYNREGSNSLICSCDYDGGSVHISKHPTQHNLFAMSLFGDRIFYSTWKMKTIWIANKHTGKDMVRINLHSSFVPLGELKVVHPLAQPKAEDDTWEPEQKLCKLRKGNCSSTVCGQDLQSHLCMCAEGYALSRDRKYCEDVNECAFWNHGCTLGCKNTPGSYYCTCPVGFVLLPDGKRCHQLVSCPRNVSECSHDCVLTSEGPLCFCPEGSVLERDGKTCSGCSSPDNGGCSQLCVPLSPVSWECDCFPGYDLQLDEKSCAASGPQPFLLFANSQDIRHMHFDGTDYGTLLSQQMGMVYALDHDPVENKIYFAHTALKWIERANMDGSQRERLIEEGVDVPEGLAVDWIGRRFYWTDRGKSLIGRSDLNGKRSKIITKENISQPRGIAVHPMAKRLFWTDTGINPRIESSSLQGLGRLVIASSDLIWPSGITIDFLTDKLYWCDAKQSVIEMANLDGSKRRRLTQNDVGHPFAVAVFEDYVWFSDWAMPSVMRVNKRTGKDRVRLQGSMLKPSSLVVVHPLAKPGADPCLYQNGGCEHICKKRLGTAWCSCREGFMKASDGKTCLALDGHQLLAGGEVDLKNQVTPLDILSKTRVSEDNITESQHMLVAEIMVSDQDDCAPVGCSMYARCISEGEDATCQCLKGFAGDGKLCSDIDECEMGVPVCPPASSKCINTEGGYVCRCSEGYQGDGIHCLDIDECQLGEHSCGENASCTNTEGGYTCMCAGRLSEPGLICPDSTPPPHLREDDHHYSVRNSDSECPLSHDGYCLHDGVCMYIEALDKYACNCVVGYIGERCQYRDLKWWELRHAGHGQQQKVIVVAVCVVVLVMLLLLSLWGAHYYRTQKLLSKNPKNPYEESSRDVRSRRPADTEDGMSSCPQPWFVVIKEHQDLKNGGQPVAGEDGQAADGSMQPTSWRQEPQLCGMGTEQGCWIPVSSDKGSCPQVMERSFHMPSYGTQTLEGGVEKPHSLLSANPLWQQRALDPPHQMELTQ

SEQ ID NO: 417 - protein, 346 aa, Homo sapiens
MAMVSEFLKQAWFIENEEQEYVQTVKSSKGGPGSAVSPYPTFNPSSDVAALHKAIMVKGVDEATIIDILTKRNNAQRQQIKAAYLQETGKPLDETLKKALTGHLEEVVLALLKTPAQFDADELRAAMKGLGTDEDTLIEILASRTNKEIRDINRVYREELKRDLAKDITSDTSGDFRNALLSLAKGDRSEDFGVNEDLADSDARALYEAGERRKGTDVNVFNTILTTRSYPQLRRVFQKYTKYSKHDMNKVLDLELKGDIEKCLTAIVKCATSKPAFFAEKLHQAMKGVGTRHKALIRIMVSRSEIDMNDIKAFYQKMYGISLCQAILDETKGDYEKILVALCGGN

SEQ ID NO: 418 - protein, 505 aa, Homo sapiens
MSYPGYPPPPGGYPPAAPGGGPWGGAAYPPPPSMPPIGLDNVATYAGQFNQDYLSGMAANMSGTFGGANMPNLYPGAPGAGYPPVPPGGFGQPPSAQQPVPPYGMYPPPGGNPPSRMPSYPPYPGAPVPGQPMPPPGQQPPGAYPGQPPVTYPGQPPVPLPGQQQPVPSYPGYPGSGTVTPAVPPTQFGSRGTITDAPGFDPLRDAEVLRKAMKGFGTDEQAIIDCLGSRSNKQRQQILLSFKTAYGKDLIKDLKSELSGNFEKTILALMKTPVLFDIYEIKEAIKGVGTDEACLIEILASRSNEHIRELNRAYKAEFKKTLEEAIRSDTSGHFQRLLISLSQGNRDESTNVDMSLAQRDAQELYAAGENRLGTDESKFNAVLCSRSRAHLVAVFNEYQRMTGRDIEKSICREMSGDLEEGMLAVVKCLKNTPAFFAERLNKAMRGAGTKDRTLIRIMVSRSETDLLDIRSEYKRMYGKSLYHDISGDTSGDYRKILLKICGGND

SEQ ID NO: 419 - protein, 339 aa, Homo sapiens
MSTVHEILCKLSLEGDHSTPPSAYGSVKAYTNFDAERDALNIETAIKTKGVDEVTIVNILTNRSNAQRQDIAFAYQRRTKKELASALKSALSGHLETVILGLLKTPAQYDASELKASMKGLGTDEDSLIEIICSRTNQELQEINRVYKEMYKTDLEKDIISDTSGDFRKLMVALAKGRRAEDGSVIDYELIDQDARDLYDAGVKRKGTDVPKWISIMTERSVPHLQKVFDRYKSYSPYDMLESIRKEVKGDLENAFLNLVQCIQNKPLYFADRLYDSMKGKGTRDKVLIRIMVSRSEVDMLKIRSEFKRKYGKSLYYYIQQDTKGDYQKALLYLCGGDD

SEQ ID NO: 420 - protein, 323 aa, Homo sapiens
MASIWVGHRGTVRDYPDFSPSVDAEAIQKAIRGIGTDEKMLISILTERSNAQRQLIVKEYQAAYGKELKDDLKGDLSGHFEHLMVALVTPPAVFDAKQLKKSMKGAGTNEDALIEILTTRTSRQMKDISQAYYTVYKKSLGDDISSETSGDFRKALLTLADGRRDESLKVDEHLAKQDAQILYKAGENRWGTDEDKFTEILCLRSFPQLKLTFDEYRNISQKDIVDSIKGELSGHFEDLLLAIVNCVRNTPAFLAERLHRALKGIGTDEFTLNRIMVSRSEIDLLDIRTEFKKHYGYSLYSAIKSDTSGDYEITLLKICGGDD

SEQ ID NO: 421 - protein, 319 aa, Homo sapiens
MATKGGTVKAASGFNAMEDAQTLRKAMKGLGTDEDAIISVLAYRNTAQRQEIRTAYKSTIGRDLIDDLKSELSGNFEQVIVGMMTPTVLYDVQELRRAMKGAGTDEGCLIEILASRTPEEIRRISQTYQQQYGRSLEDDIRSDTSFMFQRVLVSLSAGGRDEGNYLDDALVRQDAQDLYEAGEKKWGTDEVKFLTVLCSRNRNHLLHVFDEYKRISQKDIEQSIKSETSGSFEDALLAIVKCMRNKSAYFAEKLYKSMKGLGTDDNTLIRVMVSRAEIDMLDIRAHFKRLYGKSLYSFIKGDTSGDYRKVLLVLCGGDD

SEQ ID NO: 422 - protein, 247 aa, Homo sapiens
MTILFLTMVISYFGCMKAAPMKEANIRGQGGLAYPGVRTHGTLESVNGPKAGSRGLTSLADTFEHVIEELLDEDQKVRPNEENNKDADLYTSRVMLSSQVPLEPPLLFLLEEYKNYLDAANMSMRVRRHSDPARRGELSVCDSISEWVTAADKKTAVDMSGGTVTVLEKVPVSKGQLKQYFYETKCNPMGYTKEGCRGIDKRHWNSQCRTTQSYVRALTMDSKKRIGWRFIRIDTSCVCTLTIKRGR

SEQ ID NO: 423 - protein, 345 aa, Homo sapiens
MISPVLILFSSFLCHVAIAGRTCPKPDDLPFSTVVPLKTFYEPGEEITYSCKPGYVSRGGMRKFICPLTGLWPINTLKCTPRVCPFAGILENGAVRYTTFEYPNTISFSCNTGFYLNGADSAKCTEEGKWSPELPVCAPIICPPPSIPTFATLRVYKPSAGNNSLYRDTAVFECLPQHAMFGNDTITCTTHGNWTKLPECREVKCPFPSRPDNGFVNYPAKPTLYYKDKATFGCHDGYSLDGPEEIECTKLGNWSAMPSCKASCKVPVKKATVVYQGERVKIQEKFKNGMLHGDKVSFFCKNKEKKCSYTEDAQCIDGTIEVPKCFKEHSSLAFWKTDASDVKPC

SEQ ID NO: 424 - protein, 212 aa, Homo sapiens
MNSFSTSAFGPVAFSLGLLLVLPAAFPAPVPPGEDSKDVAAPHRQPLTSSERIDKQIRYILDGISALRKETCNKSNMCESSKEALAENNLNLPKMAEKDGCFQSGFNEETCLVKIITGLLEFEVYLEYLQNRFESSEEQARAVQMSTKVLIQFLQKKAKNLDAITTPDPTTNASLLTKLQAQNQWLQDMTTHLILRSFKEFLQSSLRALRQM

SEQ ID NO: 425 - protein, 92 aa, Homo sapiens
MKLCVTVLSLLMLVAAFCSPALSAPMGSDPPTACCFSYTARKLPRNFVVDYYETSSLCSQPAVVFQTKRSKQVCADPSESWVQEYVYDLELN

SEQ ID NO: 426 - protein, 745 aa, Homo sapiens
MGVPFFSSLRCMVDLGPCWAGGLTAEMKLLLALAGLLAILATPQPSEGAAPAVLGEVDTSLVLSSMEEAKQLVDKAYKERRESIKQRLRSGSASPMELLSYFKQPVAATRTAVRAADYLHVALDLLERKLRSLWRRPFNVTDVLTPAQLNVLSKSSGCAYQDVGVTCPEQDKYRTITGMCNNRRSPTLGASNRAFVRWLPAEYEDGFSLPYGWTPGVKRNGFPVALARAVSNEIVRFPTDQLTPDQERSLMFMQWGQLLDHDLDFTPEPAARASFVTGVNCETSCVQQPPCFPLKIPPNDPRIKNQADCIPFFRSCPACPGSNITIRNQINALTSFVDASMVYGSEEPLARNLRNMSNQLGLLAVNQRFQDNGRALLPFDNLHDDPCLLTNRSARIPCFLAGDTRSSEMPELTSMHTLLLREHNRLATELKSLNPRWDGERLYQEARKIVGAMVQIITYRDYLPLVLGPTAMRKYLPTYRSYNDSVDPRIANVFTNAFRYGHTLIQPFMFRLDNRYQPMEPNPRVPLSRVFFASWRVVLEGGIDPILRGLMATPAKLNRQNQIAVDEIRERLFEQVMRIGLDLPALNMQRSRDHGLPGYNAWRRFCGLPQPETVGQLGTVLRNLKLARKLMEQYGTPNNIDIWMGGVSEPLKRKGRVGPLLACIIGTQFRKLRDGDRFWWENEGVFSMQQRQALAQISLPRIICDNTGITTVSKNNIFMSNSYPRDFVNCSTLPALNLASWREAS

SEQ ID NO: 427 - protein, 98 aa, Homo sapiens
MMCGAPSATQPATAETQHIADQVRSQLEEKENKKFPVFKAVSFKSQVVAGTNYFIKVHVGDEDFVHLRVFQSLPHENKPLTLSNYQTNKAKHDELTYF

SEQ ID NO: 428 - protein, 122 aa, Homo sapiens
MAWVSFYLLPFIFSTGLCALPVLTQPPSASALLGASIKLTCTLSSEHSTYTIEWYQQRPGRSPQYIMKVKSDGSHSKGDGIPDRFMGSSSGADRYLTFSNLQSDDEAEYHCGESHTIDGQVG

SEQ ID NO: 429 - protein, 207 aa, Homo sapiens
MTSRKKVLLKVIILGDSGVGKTSLMNQYVNKKFSNQYKATIGADFLTKEVMVDDRLVTMQIWDTAGQERFQSLGVAFYRGADCCVLVFDVTAPNTFKTLDSWRDEFLIQASPRDPENFPFVVLGNKIDLENRQVATKRAQAWCYSKNNIPYFETSAKEAINVEQAFQTIARNALKQETEVELYNEFPEPIKLDKNDRAKASAESCSC

SEQ ID NO: 430 - protein, 249 aa, Homo sapiens
MAMLRVQPEAQAKVDVFREDLCTKTENLLGSYFPKKISELDAFLKEPALNEANLSNLKAPLDIPVPDPVKEKEKEERKKQQEKEDKDEKKKGEDEDKGPPCGPVNCNEKIVVLLQRLKPEIKDVIEQLNLVTTWLQLQIPRIEDGNNFGVAVQEKVFELMTSLHTKLEGFHTQISKYFSERGDAVTKAAKQPHVGDYRQLVHELDEAEYRDIRLMVMEIRNAYAVLYDIILKNFEKLKKPRGETKGMIY

SEQ ID NO: 431 - protein, 424 aa, Homo sapiens; identical to SEQ ID NO: 399

SEQ ID NO: 432 - protein, 267 aa, Homo sapiens; identical to SEQ ID NO: 24

SEQ ID NO: 433 - protein, 330 aa, Homo sapiens [sequence omitted]

SEQ ID NO: 434 - protein, 339 aa, Homo sapiens
MAEASSDPGAEEREELLGPTAQWSVEDEEEAVHEQCQHERDRQLQAQDEEGGGHVPERPKQEMLLSLKPSEAPELDEDEGFGDWSQRPEQRQQHEGAQGALDSGEPPQCRSPEGEQEDRPGLHAYEKEDSDEVHLEELSLSKEGPGPEDTVQDNLGAAGAEEEQEEHQKCQQPRTPSPLVLEGTIEQSSPPLSPTTKLIDRTESLNRSIEKSNSVKKSQPDLPISKIDQWLEQYTQAIETAGRTPKLARQASIELPSMAVASTKSRWETGEVQAQSAAKTPSCKDIVAGDMSKKSLWEQKGGSKTSSTIKSTPSGKRYKFVATGHGKYEKVLVEGGPAP

SEQ ID NO: 435 - protein, 648 aa, Homo sapiens
MGCAEGKAVAAAAPTELQTKGKNGDGRRRSAKDHHPGKTLPENPAGFTSTATADSRALLQAYIDGHSVVIFSRSTCTRCTEVKKLFKSLCVPYFVLELDQTEDGRALEGTLSELAAETDLPVVFVKQRKIGGHGPTLKAYQEGRLQKLLKMNGPEDLPKSYDYDLIIIGGGSGGLAAAKEAAQYGKKVMVLDFVTPTPLGTRWGLGGTCVNVGCIPKKLMHQAALLGQALQDSRNYGWKVEETVKHDWDRMIEAVQNHIGSLNWGYRVALREKKVVYENAYGQFIGPHRIKATNNKGKEKIYSAERFLIATGERPRYLGIPGDKEYCISSDDLFSLPYCPGKTLVVGASYVALECAGFLAGIGLDVTVMVRSILLRGFDQDMANKIGEHMEEHGIKFIRQFVPIKVEQIEAGTPGRLRVVAQSTNSEEIIEGEYNTVMLAIGRDACTRKIGLETVGVKINEKTGKIPVTDEEQTNVPYIYAIGDILEDKVELTPVAIQAGRLLAQRLYAGSTVKCDYENVPTTVFTPLEYGACGLSEEKAVEKFGEENIEVYHSYFWPLEWTIPSRDNNKCYAKIICNTKDNERVVGFHVLGPNAGEVTQGFAAALKCGLTKKQLDSTIGIHPVCAEVFTTLSVTKRSGASILQAGCG
